United States Patent Application Publication US 2024/0294613 A1 - sequence listing, part 2

SEQ ID NO: 7068 - DNA, 358 bp, Homo sapiens
caggtgcggctggtgcagtctggggctgaggtgaagaagcctgggtcctcggtgaaggtctcctgcaaggcctctggaggcgccttcaccgactattctgtcagctgggtgcgacacgcccctggacaagggcttgagtgggtgggaaggatcatccctattcttggtataacaaaatacgcacaggactttcagggcagagtcatgatgaccgcggacaaatccacggtcacagcctacatggagctgagtagcctcagatctgaggacacggccgtctattattgtgtcgcaagtggctacgattacgactggttcgacccctggggccagggaaccctggtcaccgtctcctcag

SEQ ID NO: 7069 - DNA, 361 bp, Homo sapiens
cagatcaccttgaaggagtctggtcctacgctggtgaaacccacacagaccctcacgctgacctgcaccttctctgggttctcactcagaactagtggagtgggtgtgggctggatccgtcagtccccaggaaaggccctggagtggcttgcactcatttattgggatgatgataagcgcgacagcccatctctgaagagcaggctcaccatcaccaaggacacctccaaaaaccaggtggtccttacaatgaccaacatggaccctgtggacacagccacatattactgtgcacacagacatccctacgtaggtgggttcgacccctggggccagggaaccctggtcaccgtctcctcag

SEQ ID NO: 7070 - DNA, 364 bp, Homo sapiens
gaggtgcagctggtggagtctgggggaggcttggtaaagccagggcggtccctgagactctcctgtacagcttctggattcacctttggtgattatgctatgagctggttccgccaggctccagggaaggggctggagtgggtaggtttcattagaagcaaagcttatggtgggacaacagaatacgccgcgtctgtgaaaggcagattcaccatctcaagagatgattccaaaagcatcgcctatctgcaaatgaacagcctgaaaaccgaggacacagccgtgtattactgtactagagatttgggtcggtggctggtatttgactactggggccagggaaccctggtcaccgtctcctcag

SEQ ID NO: 7071 - DNA, 361 bp, Homo sapiens
caggtgcagctgcaggagtcgggcccaggactggtgaagccttcggagaccctgtccctcacctgcactgtctctggtggctccgttaccagtggtagttatcactggacctggatccggcagcccccagggaagggactggagtggattggatatatctattacagtgggagcaccaattacaacccctccctcaagagtcgcgtcaccatgtcagtagacacgtccaagaaccagttctccctgaagctgaggtttgtgaccgctgcggacacggccgtgtattactgtgcgagggtcccttatagcaccagctccattgactgctggggccagggaaccctggtcaccgtctcctcag

SEQ ID NO: 7072 - DNA, 361 bp, Homo sapiens
cagctgcagctgcaggagtcgggcccaggactggtgaagccttcggagaccctgtccctcacctgcactgtctctggtggctccatcagcagtagtagttactactggggctggatccgccagcccccagggaaggggctggagtggattgggagtatctattatagtgggagcacctactacaacccgtccctcaagagtcgagtcaccatatcagtagacacgtccaagaaccagttctccctgaagctgagctctgtgaccgcagcggacacggccgtgtattactgtgcgagaaggccgataagggattttgtctttgactactggggccagggaaccctggtcaccgtctcctcag

SEQ ID NO: 7073 - DNA, 361 bp, Homo sapiens
cagctgcagctgcaggagtcgggcccaggactggtgaagccttcggagaccctgtccctcacctgcactgtctctggtggctccatcagcagtagtagttactactggggctggatccgccagcccccagggaaggggctggagtggattgggagtatctattatagtgggagcacctactacaacccgtccctcaagagtcgagtcaccatatccgtagacacgtccaagaaccagttctccctgaagctgagctctgtgaccgccgcagacacggctgtgtattactgtgcgatcggtataactggaactagagggttctactactggggccagggaaccctggtcaccgtctcctcag

SEQ ID NO: 7074 - DNA, 361 bp, Homo sapiens
cagctgcagctgcaggagtcgggcccaggactggtgaagccttcggagaccctgtccctcacctgcactgtctctggtggctccatcagcagtagtagttactactggggctggatccgccagcccccagggaaggggctggagtggattgggagtttcttttatactgggagcacctactacaacccgtccctcaagagtcgagtcaccatatcagtagacacgtccaagaaccagttctccctgaacctgagctctgtgaccgcagcggacacggccgtgtattactgtgcgagagatccgaacggtgactacgcaattgactactggggccagggaaccctggtcaccgtctcctcag

SEQ ID NO: 7075 - DNA, 358 bp, Homo sapiens
caggtgcagctggtgcagtctggggctgaggtgaagaagcctgggtcctcggtgaaggtctcctgcaaggcctctggaggcaccttcagcagctatgctatcagctgggtgcgacaggcccctggacaagggcttgagtggatgggaaggatcatccctatccttggtatagcaaataacgcacagaagttccagggcagagtcacgattaccgcggacaaatccacgagcacagtctacatggagctgagtaggctgagatctgaggacacggccgtgtattactgtgcgagagattgtagtggtggtagctgctctggctactggggccagggaaccctggtcaccgtctcctcag

SEQ ID NO: 7076 - DNA, 358 bp, Homo sapiens
caggtccagctggtgcaatctggggctgaggtgaagaagcctgggtcctcggtgaaggtctcctgcaaggcttctggaggcaccttcagcagctatactatcagctgggtgcgacaggcccctggacaagggcttgagtggatgggaaggatcatccctatccttggtatagcaaactacgcacagaagttccagggcagagtcacgattaccgcggacaaatccacgagcacagcctacatggagctgagcagcctgagatctgaggacacggccgtgtattactgtgcgagccatagtgggagctactactactttgactactggggccagggaaccctggtcaccgtctcctcag

SEQ ID NO: 7077 - DNA, 358 bp, Homo sapiens
caggtccagctggtgcaatctggggctgaggtgaagaagcctgggtcctcggtgaaggtctcctgcaaggcttctggaggcaccttcagcagctatactatcagctgggtgcgacaggcccctggacaagggcttgagtggatgggaaggatcatctttttccttggtgtagcagaccacgcacagaagttcctgggcagagtcacgattaccgcggacaaatccacgagcaccgtcaacatggagttgagcagcctgagatctgacgacacggccgtatattattgtgcgagtgataagtatagtgggacacggtttgactgctggggccagggaaccctggtcactgtctcctcag

SEQ ID NO: 7078 - DNA, 358 bp, Homo sapiens
caggtgcacctggtgcaatctggggctgaggtgaagaagcctgggtcctcggtgaaggtctcctgcaaggcttctggaggccccttcagcaactttgctatcacctgggtgcgacaggcccctggacaagggcttgagtggatgggagggatcatccctatctttggtacaacaaacttcgcacagaagttccagggcagagtcacgattaccgcggacgaatccacgagcacagcctacatggagctgagcagcctgagatctgaagacacggccgtgtattactgtgcgggccgtacagcagctcggcccgatgatgacttctggggccagggaaccctggtcaccgtctcctcag

SEQ ID NO: 7079 - DNA, 358 bp, Homo sapiens
caggtgcagctggtgcagtctggggctgaggtgaagaagcctgggtcctcggtgaaggtctcctgcaaggcttctggaggcaccttcagcagctatgctatcagctgggtgcgacaggcccctggacaagggcttgagtggatgggaaggatcatccctatccttggtatagcaaactacgcacagaagttccagggcagagtcacgattaccgcggacaaatccacgagcacagcctacatggagctgagcagcctgagatctgaggacacggccgtgtattactgtgcgagagatggcagcagctggtacctgaccgactactggggccagggaaccctggtcaccgtctcctcag

SEQ ID NO: 7080 - DNA, 358 bp, Homo sapiens
gaggtgcagctggttcagtctggagcagaggtgaaaaagcccggggagtctctgaagatctcctgtaagggttctggatacacctttaccacctactggatcggctgggtgcgccagatgcccgggaaaggcctggagtggatggggatcatctatcctggtgactctgataccagatacagcccgtccttccaaggccaggtcaccatctcagccgacaagtccatcagcaccgcctacctgcagtggagcagcctgaaggcctcggacaccgccatgtattactgtgcgagacgggtaaacggttggtactactttgacttttggggccagggaaccctggtcaccgtctcctcag

SEQ ID NO: 7081 - DNA, 361 bp, Homo sapiens
gaagtgcagctggtgcagtctggagcagaggtgaagaagcccggggaatctctgaggatctcctgtaagggttctggatacagtttttccaagaactactggatcgcctgggtgcgccagatgcccgggaaaggcctggagtggatggggatcatctatcctggtgactctgataccacatacagtccgtccctccaaggccaggtcaccatctcagccgacaagtccaccagcaccgcctacctgcagtggagcaacctgaaggcctcggacaccgccctatattactgtgcgaggacccccgggtatagtagcccttttgactactggggccagggaaccctggtcaccgtctcctcag

SEQ ID NO: 7082 - DNA, 364 bp, Homo sapiens
gaggtgcagctggtggagtctgggggaggcttggtaaagcctggggggtcccttagactctcctgtgcagcctctggtttcactttcagtaacgcctggatgaactgggtccgccaggctccagggaaggggctggagtgggtcggccgtattaaaagcaaaactgatggtgggacgacagactacgctgcacccgtgaaaggcagattcaccatctcaagagatgattcaataaacacactgtttctgcaaatgaacagcctgaaaaccgacgacacagccgtttattactgtgccgcctccccgttttggagtggttattacgacaactggggccagggaaccctggtcaccgtctcctcag

SEQ ID NO: 7083 - DNA, 358 bp, Homo sapiens
gaggtgcagctgttggagtctgggggaggcttggtacagcctggggggtccctgagactctcctgtgcagcctctggattcacctttagcagctatgccatgagctgggtccgccaggctccagggaaggggctggagtgggtctcagctattagtggtcgtggtggtagcacatactacgcagactccgtgaagggccggttcaccatctccagagacaattccaagaacacgctgtatctgcaaatgaacagcctgagagccgaggacacggccgtatattactgtgcgaaagatagcaccagctggtacgaaattgactactggggccagggaaccctggtcaccgtctcctcag

SEQ ID NO: 7084 - DNA, 358 bp, Homo sapiens
caggtgcagctgcaggagtcgggcccaggactggtgaagccttcggggaccctgtccctcacctgcgctgtctctggtggctccatcagcagtagtaactggtggagttgggtccgccagcccccagggaaggggctggagtggattggggaaatctatcatagtgggagcaccaactacaacccgtccctcaagagtcgagtcaccatatcagtagacaagtccaagaaccagttctccctgaagttgagctctgtgaccgccgcggacacggccgtgtattactgtgcgagcttaattcagcgggggaacacctttgactactggggccagggaaccctggtcagcgtctcctcag

SEQ ID NO: 7085 - DNA, 358 bp, Homo sapiens
caggtgcagctgcaggagtcgggcccaggactggtgaagccttcggggaccctgtccctcacctgcgctgtctctggtggctccatcagcagtagtaactggtggagttgggtccgccagcccccagggaaggggctggagtggattggggaaatctatcatagtgggagcaccaactacaacccgtccctcaagagtcgagtcaccatatcagtagacaagtccaagaaccagttctccctgaagctgagctctgtgaccgccgcggacacggccgtgtattactgtgcgagacgagattacgcgggtgactacgaaggctactggggccagggaaccctggtcaccgtctcctcag

SEQ ID NO: 7086 - DNA, 361 bp, Homo sapiens
cagatcaccttgaaggagtctggtcttacgctggtgaaacccacacagaccctcacgctgacctgcactttctctgggttctcactcagcactagtggagtgggtgtgggctggatccgtcagcccccaggaaaggccctggagtggcttgcactcatttattgggatgatgataagcgctacagcccatctctgaagagcaggctcaccatcaccaaggacacctccaaaaaccaggtggtccttacaatgaccaacatggaccctgtggacacagccacatattactgttctaggcggagtcggagtgggagccattttgactactggggccagggaaccctggtcaccgtctcctcag

SEQ ID NO: 7087 - DNA, 355 bp, Homo sapiens
gaggtgcagctggtggagtctggaggaggcttgatccagcctggggggtccctgagactctcctgtgcagcctctgggttcaccgtcagtagcaactacatgagctgggtccgccaggctccagggaaggggctggagtgggtctcagttatttatagcggtggtagcacatactacgcagactccgtgaagggccgattcaccatctccagagacaattccaagaacacgctgtatcttcaaatgaacagcctgagagccgaggacacggccgtgtattactgtgcgagatcaagtggctggtacttctatttcgactactggggccagggaaccctggtcaccgtctcctcag

SEQ ID NO: 7088 - DNA, 355 bp, Homo sapiens
gaggtgcagctggtggagtctggaggaggcttgatccagcctggggggtccctgagactctcctgtgcagcctctgggttcaccgtcagtagcaactacatgagctgggtccgccaggctccagggaaggggctggagtgggtctcacttatttatagcggtggtaccacatactacgcagactccgtgaagggccgattcaccatctccagagacaattccaagaacacgctgtatcttcaaatgaacagcctgagagccgaggacacggccgtgtattactgtgcgagaggggagatgaatgacttaccatttgactactggggccagggaaccctggtcaccgtctcctcag

SEQ ID NO: 7089 - DNA, 358 bp, Homo sapiens
caggtgcagctggtgcagtctggggctgaggtgatgaagcctggggcctcagtgaaagtttcctgcaaggcatctggatacaccttcaccagctactatatgcactgggtgcgacaggcccctggacaagggcttgagtggatgggaataatcaaccctagtggtggtggcacaacctacgcacagaagttccagggcagagtcaccatgaccagggacacgtccacgagcacagtctacatggagctgagcagcctgagatctgaggacacggccgtgtattactgtgcgaggtacgacggtggtagctcgcgacctgactactggggccagggaaccctggtcaccgtctcctcag

SEQ ID NO: 7090 - DNA, 361 bp, Homo sapiens
cagatcaccttgaaggagtctggtcctacgctggtgaaacccacacagaccctcacgctgacctgcaccctctctggggtctccctctctaatactggagtaggtgtggcctggatccgtcagcccccaggaaaggccctggagtggcttgctttcatttattgggatgatgataagcgctacagcccatctctgaggagcagactcaccatcaccaaggacacctccaaaaaccaggttgtccttacaatgaccaacatggaccctgtggacacaggcacatattactgtgcacacaggataatagggactctcagcttcgatatctggggccgtggcaccctggtcactgtctcctcag

SEQ ID NO: 7091 - DNA, 358 bp, Homo sapiens
gaagtgcagctggtgcagtctggagcagaggtgaaaaagcccggggagtctctgaggatctcctgtaagggttctggatacagctttaccagctactggatcagctgggtgcgccagatgcccgggaaaggcctggagtggatggggaggattgatcctagtgactcttataccaactacagcccgtccttccaaggccacgtcaccatctcagctgacaagtccatcagcactgcctacctgcagtggagcagcctgaaggcctcggacaccgccatgtattactgtgcgagaattttgagtgggagctactggttcgacccctggggccagggaaccctggtcaccgtctcctcag

SEQ ID NO: 7092 - DNA, 358 bp, Homo sapiens
gaggtgcagctggtggagtccgggggaggcttagttcagcctggggggtccctgagactctcctgtgcagcctctggattcaccttcagtagctactggatgcactgggtccgccaagctccagggaaggggctggtgtgggtctcacgtattaatagtgatgggagtagcacaagctacgcggactccgtgaagggccgattcaccatctccagagacaacgccaagaacacgctgtatctgcaaatgaacagtctgagagccgaggacacggctgtgtattactgtgcaagagagggcgggtatagcagcagcttggcctactggggccagggaaccctggtcaccgtctcctcag

SEQ ID NO: 7093 - DNA, 367 bp, Homo sapiens
caggtccagctggtacagtctggggctgaggtgaagaagcctggggcctcagtgaaggtctcctgcaaggtttccggatacaccctcattgaagtatccatgcactgggtgcgacaggctcctggaaaagggcttgagtggatgggaggttttgattctgaagatgttgaaataatttacgcacagaagttccagggcagagtcaccatgaccgaggacacatctacagacacagcctacatggaactgagcagcctgagatctgaggacacggccgtgtattactgtgcaacaaggtgggcaatcgactatagcagctcgtactttgactactggggccagggaaccctggtcaccgtctcctcag

SEQ ID NO: 7094 - DNA, 355 bp, Homo sapiens
gaggtgcagctggtggagtctgggggaggcttggtccagcctggggggtccctgagactctcctgtgcagcctctggattcaccgtcagtagcagctacatgagctgggtccgccaggctccgggggaggggctggactgggtctcagttatttatcgcggtggtagcacatactacgcagactccgtgaagggccgattcaccatctccagagacaattccaagaacacgctgcatcttcaaatgaacagcctgagaattgaggacacggctgtgtattactgtgcgagaaggcatagcggcagctgggggcatgacctctggggccagggaaccctggtcaccgtctcctcag

SEQ ID NO: 7095 - DNA, 355 bp, Homo sapiens
gaggtgcagctggtggagtctgggggaggcttggtccagcctggggggtccctgagactctcctgtgcagcctctggattcaccgtcagtagcaactacatgagctgggtccgccaggctccagggaaggggctggagtgggtctcagttatttatagcggtggtagcacatactacgcagactccgtgaagggccgattcaccatctccagagacaattccaagaacacgctgtatcttcaaatgaacagcctgagagctgaggacacggctgtgtattactgtgcgagagggatcgactacggtgactactttggttactggggccagggaaccctggtcaccgtctcctcag

SEQ ID NO: 7096 - DNA, 361 bp, Homo sapiens
cagctgcagctgcaggagtcgggcccaggactggtgaagccttcggagaccctgtccctcacctgcactgtctctggtggctccatcagcagtagtaattactactggggctggatccgccagcccccagggaaggggctggagtggattgggagggtccattttagtgggggcacctactacaacccgtccctcaagagtcgagtcaccatatccgtggacacgtccaagaaccagttctccctgaagctgagctctgtgaccgccgcagacacggctgtgtattactgtgcgagtccctatagcaccagctggtattacgaccactggggccagggaaccctggtcaccgtctcctcag

SEQ ID NO: 7097 - DNA, 355 bp, Homo sapiens
caggtgcagctgcaggagtcgggcccaggactggtgaagccttcggagaccctgtccctcacctgcactgtctctggtgactccatcagtcgttactactggaactggatccggcagcccccagggaagggactggagtgcattgggcatatctattacagtgggggcgccacctacaacccctccctcaacagtcgggccaccatatcagtagacaggtccaagcaccagttctccctgcaactgacctctgtgaccgctgcggacacggccgtgtattactgtgcgagagaaggcggtggttacggattctttgactactggagccaggggaccctggtcaccgtctcctcag

SEQ ID NO: 7098 - DNA, 355 bp, Homo sapiens
caggtgcagctgcaggagtcgggcccaggactggtgaagccttcggagaccctgtccctcacctgcactgtctctggtggctccatcagtagttactactggagctggatccggcagcccccagggaagggactggagtggattgggtatatctattacagtgggagcaccaactacaacccctccctcaagagtcgagtcaccatatcagtagacacgtccaagaaccagttctccctgaagctgagctctgtgaccgctgcggacacggccgtgtattactgtgcgaggcacccagcagctggcacaatttttgactactggggccagggaaccctggtcaccgtctcctcag

SEQ ID NO: 7099 - DNA, 355 bp, Homo sapiens
caggtgcagctgcaggagtcgggcccaggactggtgaagccttcggagaccctgtccctcacctgcactgtctctggtggctccatcagtagttactactggagctggatccggcagcccccagggaagggactggagtggattgggtatatctattacagtgggagcaccaactacaacccctccctcaagagtcgagtcaccatatcagtagacacgtccaagaaccagttctccctgaagctgagctctgtgaccgccgcagacacggccgtgtattactgtgcgagacataagtggttaaagggggatattgactactggggccagggaaccctggtcaccgtctcctcag

SEQ ID NO: 7100 - DNA, 355 bp, Homo sapiens
caggtgcagctgcaggagtcgggcccaggactggtgaagccttcggagaccctgtccctcacctgcactgtctctggtggctccatcagtagttactactggagctggatccggcagcccccagggaagggactggagtggattgggtatatctattacagtgggagcaccaactacaacccctccctcaagagtcgagtcaccatatcagtagacacgtccaagaaccagttctccctgaagctgagctctgtgaccgccgcagacacggccgtgtattactgtgcgagggaggggattttgactggttaccttgactactggggccagggaaccctggtcaccgtctcctcag

SEQ ID NO: 7101 - DNA, 361 bp, Homo sapiens
caggtcaccttgaaggagtctggtcctgcgctggtgaaacccacacagaccctcacactgacctgcaccttctctgggttctcactcagcactagtggaatgcgtgtgagctggatccgtcagcccccagggaaggccctggagtggcttgcacgcattgattgggatggtgataaattctacagcacatctctgaagaccaggctcaccatctccaaggacacgtccacaaaccaggtggtccttacaatgaccaacatggaccctgtggacacagccacgtattactgtgcacggtcgactacggtgaggggtccttttgactgctggggccagggaaccctggtcaccgtctcctcag

SEQ ID NO: 7102 - DNA, 367 bp, Homo sapiens
caggtccagctggtgcaatctggggctgaggtgaagaagcctgggtcctcggtgaaggtttcctgcaaggcttctggaggcaccttcaccagctataccatcagctgggtgcgacaggcccctggacaagggcttgagtgggtgggaaggatcatccctatccttgatttggcaaactacgcacagaagttccagggcagagtcacgattaccgcggacaaatccacgagcacagtctacatggacctgagcagcctgagatctgaggacacggccgtgtattactgtgcacgggattacgtttggggaaacaacgtctactactttgactcctggggccagggaaccctggtcaccgtctcctcag

SEQ ID NO: 7103 - DNA, 362 bp, Homo sapiens
caggtgcagctgcaggagtcgggcccgggactggtgaagccttcggagaccctgtccctcacgtgcactgtctccggtggctccatcagtagttactactggagctggatccggcagcccccagggaagggactggagtgggttggctatatacgttacagtgggagcaccaactacaacccctccctcaagagtcgactcaccatgtcagtagacacgtccaagaaccagttctccctgaagctgagctctgtgaccgccgcagacacggccgtgtattactgtgcgagatattattgtcctactaccacctgctatgcccttgactactggggccagggaaccctggtcaccgtctcctc

SEQ ID NO: 7104 - DNA, 364 bp, Homo sapiens
caggtgcagctgcaggagtcgggcccaggactggtgaagccttcggagaccctgtccctcacctgcactgtctctggtgactccatcagtagttacttctggacctggatccggcagcccccagggaagggactggagtggattggatatatctattacaatgggagtcccaactacaacccctccctcaagagtcgagtcaccatgtcaatggacacgtccaagaaccagttctccctgaacctgggctctgtgaccgccgcagacacggccgtatacttctgtgcgagacgatattgtagttttatcagctgctcctatcatgactactggggccagggaaccccggtcaccgtctcctcag

SEQ ID NO: 7105 - DNA, 367 bp, Homo sapiens
caggtgcagctggtgcagtctggggctgaggtgaagaagcctggggcctcagtgaaggtctcctgcaaggcttctggatacaccttcaccgactactctatgcactgggtgcgacaggcccctggacaagggcttgagtggatgggacggatcaaccctaatagtggtggcacaaactatgcacagaagtttcagggcagggtcaccatgaccagggacacgtccatcagcacagtctacatggacctgagcaggctgagatctgacgacacggccctgtattactgtacgagatcgggtctggattggcaaaaaaagtacttctttgactactggggccagggaaccctggtcaccgtctcctcag

SEQ ID NO: 7106 - DNA, 367 bp, Homo sapiens
cagatgcagctggtgcagtctggggctgaggtgaagaagcctggggcctcagtgaaggtctcctgcaaggcttctggatacaccttcactggctactatatgcactgggtgcgacaggcccctggacaagggcttgagtggatgggacggatcaaccctaacagtggtggcacaaactatgcacagaggtttcagggcagggtcaccatgaccagggccacgtccatcagcacagccttcatggagctgagcaggctgagatctgacgacacggccatgtattattgtactatatcgggtctggattgggaaaacatttactactttggccactggggccagggaaccctggtcaccgtctcctcag

SEQ ID NO: 7107 - DNA, 367 bp, Homo sapiens
gaggtgcagctggtggagtctgggggaggcctggtcaagtctggggggtccctgagactctcctgtgcagcctctggattcaccttcagtatctatagcatgaactgggtccgccaggctccagggaaggggctggagtgggtctcatccattagtagtagtagtacttacatatactacgcagactctgtgaagggccgattcaccatctccagagacaacgccaagaactcactgtatctgcaaatgaacagcctgagagccgaggacacggctgtgtattactgtgcgaaagatcggcaagatagtggctacgacgcgccctttgactactggggccagggaaccctggtcaccgtctcctcag

SEQ ID NO: 7108 - DNA, 367 bp, Homo sapiens
gaggtgcagctggtggagtctgggggaggcttggtacagcctggggggtccctgagactctcctgtgcagcctctggattcaccttcagtagctatagtatgaactgggtccgccaggctccagggaaggggctggagtgggtttcatacattagtagtagaagtagcaccataaagtacgcagactctgtgaagggccgaatcaccatctccagagacaacgccaagaactcactgtatctgcaaatgaacagcctgagagccgaggacacggctgtgtattactgtgcgagagattcgtatagcagcagcacccgggggtaccttgactcctggggccagggaaccctggtcaccgtctcctcag

SEQ ID NO: 7109 - DNA, 367 bp, Homo sapiens
gaggtgcagctgttggagtctgggggaggcttggtacagcctggggggtccctgagactctcctgtgcagcctctggattcacctttaacctctatgccatgagctgggtccgccaggctccagggaaggggctggagtgggtctcagctattagtggtagtggtggtagcacatactacgcagactccgtgaagggccggttcaccatctccagagacaattccaagaacacgctgtatctgcaaatgaacagcctgagagccgaggacacggccgtatattactgtgcgaaagcgaaggacggtatggttcggggagttatgtttgactactggggccagggaaccctggtcaccgtctcctcag

SEQ ID NO: 7110 - DNA, 367 bp, Homo sapiens
gaggtgcagctgttggagtctgggggaggcttggtacagcctggggggtccctgagactctcctgtgcagcctctggattcacctttagcagctatgccatgagctgggtccgccaggctccagggaaggggctggagtgggtctcagctattagtggtagtggtggtagcacatactacgcagactccgtgaagggccggttcaccatctccagagacaattccaagaacacgctgtatctgcaaatgaacagcctgagagccgaggacacggccgtatattactgtgcgaaagaaagctggagcagtggctggtactatgaaaatgactactggggccagggaaccctggtcaccgtctcctcag

SEQ ID NO: 7111 - DNA, 367 bp, Homo sapiens
gaggtgcagctgttggagtctgggggaggcttggtacagcctggggggtccctgagactctcctgtgcagcctctggattcacctttagcaactatgccatgagctgggtccgccaggctccagggaaggggctggagtgggtctcaactattagtggtagtggtggtagcacatactacgcagactccgtgaagggccggttcgccatctccagagactattccaagaacacgctgtatctgcaaatgaacagcctgggagtcgacgacacggccgtatattactgtgcgaaatattgcagtggtggtggctgctccaacacccctgactactggggccagggaaccctggtcaccgtctcctcag

SEQ ID NO: 7112 - DNA, 367 bp, Homo sapiens
gaggtgcagctgttggagtctgggggaggcttggtacagcctggggggtccctgagactctcctgtgcagcctctggattcacctttagtctctatgccatgagttgggtccgccaggctccagggaaggggctggagtgggtctcagtcattagtggtaatggtggtagcacaaagtacgcagactccgtgaagggccggttcaccttctccagagacaattccaagaacacgttgtatctgcaaatgaacagcctgagagccgaggacacggccatatattactgtgcgaaacaccctactatggttcggggaggcgggtactttgactactggggccagggaaccctggtcaccgtctcctcag

SEQ ID NO: 7113 - DNA, 367 bp, Homo sapiens
gaggtgcagctgttggagtccgggggaggcttggtacagcctggggggtccctgagactctcctgtgcagcctctggattcacctttagcacctatgccatgggctgggtccgccaggctccagggaaggggctggagtgggtctcaggtattagtggtagtggttatagcacatactacgcagactccgtgaagggccggttcaccatctccagagacaattccaagaacacgctgtatctgcaaatgaacagcctgagagccgaggacacggccgtatattactgtgcgaaagaacttggtgggagctattttacggacagctttgactactggggccagggaaccctggtcaccgtctcctcag

SEQ ID NO: 7114 - DNA, 367 bp, Homo sapiens
caggtgcagctgcaggagtcgggcccaggactggtgaagccttcggagaccctgtccctcagttgcagtgtctctggttactccatcagcagtggttactactggggctggatccggcagcccccagggaaggggctggagtggattgggactatctatcatagtgggaccacctattacaacccgtccctcaagagccgagtttccgtttcagtagacacgtccaagaaccagttctccctgaagctgagctctgtgaccgccgcagacacggccgtatattactgtgcgagaattggaacagaaggtagcggtggctcctgggttgactactggggccagggaaccctggtcaccgtctcctcag

SEQ ID NO: 7115 - DNA, 373 bp, Homo sapiens
gaggtgcaactggtggagtctgggggaggcttggtaaagcctggggggtcccttagactctcctgtgtagcctctggattcactttcactaacgcctggatgagctgggtccgccaggctccagggaaggggctggagtgggttggccgtattaaaagcaaaactgatggtgggacaatagactacgctgcacccgtgaaaggcagattcaccatctcaagagatgattcaaaaaacacgctgtatctgcaaatgaacagcctgaaaaccgaggacacagccgtgtattactgtaccacagggaccagtgggagttatcccggaggagactttgactactggggccagggaaccctggtcaccgtctcctcag

SEQ ID NO: 7116 - DNA, 367 bp, Homo sapiens
caggttcagctggtgcagtctggagctgaggtgaagaagcctggggcctcagtgaaggtctcctgcaaggcttctggttacagtttcaccagctatggtatcagctgggtgcgacaggcccctggacaagggcttgagtggatgggatggatcagcgcttacaatggtaacccaaattatgcacagaagctccagggcagagtcaccatgaccacagacacatccacgagcacagcctacatggagctgaggagcctgagatctgacgacacggccgtgtattactgtgcgagagatccctccgttattgtggctaggaacccctttgactattggggccagggaaccctggtcaccgtctcctcag

SEQ ID NO: 7117 - DNA, 367 bp, Homo sapiens
caggttcagctggtgcagtctggagctgaggtgaagaagcctggggcctcagtgaaggtctcctgcaaggcttctggttacacctttaccagctatggtatcagctgggtgcgacaggcccctggacaagggcttgagtggatgggatggatcagcgcttacaatggtaacacaaactatgcacagaagctccaggacagagtcaccatgaccacagacacatccacgagcacagcctacatggagctgaggagcctgagatctgacgacacggccgtgtattactgtgcgagagatcaccgcgtagctgcaatatttggaacccttgactactggggccagggaaccctggtcaccgtctcctcag

SEQ ID NO: 7118 - DNA, 364 bp, Homo sapiens
gaggtgcagctggtggagtctggaggaggcttgatccagcctggggggtccctgagactctcctgtgcagcctctgggttcaccgtcagtaccaactacatgagctgggtccgccaggctccagggaaggggctggagtgggtctcaattatttatagcggtggtagcacatattatgcagactccgtgaagggccgattcaccatctccagagacaattccaagaacacgctgtatcttcaaatgaacagcctgagagccgaggacacggccgtgtattactgtgcgacaggacccgtcgactatagcagctcgaggagttatgactactggggccagggaaccctggtcaccgtctcctcag

SEQ ID NO: 7119 - DNA, 365 bp, Homo sapiens
gaactgcagttggtggagtctgggggaggcttggtacagcctggcaggtccctgagactgtcctgtgcagcctctgaattcacctttggtgattatgccatgcactgggtccggcaagctccagggaagggcctggagtgggtctcaggcattagttggaacagtgctgccataggctatgcggactctgtgatgggccgattcttcgtctccagagacaactccaagaattccctgcatctgcaaatgaacagtctgagaactgaggacacggccttatattactgtgcaaaagcctggggatttgggacggggctccactactttgactcctggggccaggggaccctggtcaccgtctcctc

SEQ ID NO: 7120 - DNA, 367 bp, Homo sapiens
caagtgcagctggtgcagtctggggatgaggtgaagaagcctgggtcctcggtgaaggtctcctgcaaggcttctggaggcaccttcagcagctatgctatcagctgggtgcgacaggcccctggacaagggcttgagtgcttgggagggatcatccctatctttggtacaacaaactacgcacagaaattccagggcagagtcacgattaccgcggacgaatccacgaacacagcctacatggagctgagcagcctgagatctgaggacacggccatgtattactgtgcgtattatagtggctacgactcgaggtcgggtgcttttgatgtctggggccaagggacgaaggtcaccgtctcttcag

SEQ ID NO: 7121 - DNA, 367 bp, Homo sapiens
gaggtgcagctggtggagtctgggggaggcttggtccagcctggggggtccctgagactctcctgtgcagcctctggattcacctttattaactactacatgagctgggtccgccaggctccagggaaggggctggagtgggtggccaacataaagcaagatggaagtgagaaatactatgcggactctgtgaagggccgattcaccatctccagagacaacgccaaggactccctgtttctgcaaatggacagcctgagagccgaggacacggccgtatattactgtgcgcgactgaaggtgcttcggggagtcccgtcctactttgactactggggccagggaaccctggtcaccgtctcctcag

SEQ ID NO: 7122 - DNA, 367 bp, Homo sapiens
caggtgcagctggtgcagtctggggctgaggtgaagaagcctggggcctcagtgaaggtttcctgcaaggcatctggatacaccttcaccagctactatatgcactgggtgcgacaggcccctggacaagggcttgagtggatgggaataatcaaccctagtggtggtagcacaagctacgcacagaagttccagggcagagtcaccatgaccagggacacgtccacgagcacagtctacatggagctgagcagcctgagatctgaggacacggccgtgtattactgtgcgagagataggtacccatggctggtacgtggattcttcggctactggggccagggaaccctggtcaccgtctcctcag

SEQ ID NO: 7123 - DNA, 367 bp, Homo sapiens
caggtgcagctggtgcagtctggggctgaggtgaagaagcctggggcctcagtgaaggtttcctgcaaggcatctggatacaccttcaccagctactatatgcactgggtgcgacaggcccctggacaagggcttgagtggatgggaataatcaaccctagtgctggtagcacaacctacgcacagaagttccagggcagagtcaccatgaccagtgacacgtccacgagcacagtctacatggagttgagcagcctgagatctgaggacacggccgtgtattactgtgcgagagattgggcgttattaccaagtcgacgccactttgactactggggccagggaaccctggtcaccgtctcctcag

SEQ ID NO: 7124 - DNA, 367 bp, Homo sapiens
caggtgcagctggtgcagtctggggctgaggtgaagaagcctggggcctcagtgaaggtttcctgcaaggcatctggatacaccttcaccagctactatatgcactgggtgcgacaggcccctggacaagggcttgagtggatgggaatcatcaaccctagtggtggtagcacaacctacgcacagaggttccagggcagagtcaccatgaccagtgacacgtccacgaggacagtctacatggagctgagcagtctgagatctgaggacacggccgtgtattactgtgcgagagatcaggagttcattccccaccggggtgcttttgatatttggggccaagggacaatggtcaccgtctcttcag

SEQ ID NO: 7125 - DNA, 370 bp, Homo sapiens
cagctgcaactgcaggagtcgggcccaggattggtgaagccttcggagaccctgtccctcacctgcactgtctctggtggctccatcagcactagtagttactactggggctggatccgccagcccccagggaatgggctggagtggattggcaatatcttttatactgggagcaccttctacaacccgtccctcgagagtcgagtcaccatatccgtggacacgtccaagaagcagttctccctgaagctgagctctgtgaccgccgcagacacggctgtgtattactgtgcgagacatccctacggttacgagagggatgaggcatttgatgtgtggggccaagggacaatggtcaccgtctcttcag

SEQ ID NO: 7126 - DNA, 367 bp, Homo sapiens
gaggtgcggctggtggagtccgggggaggcttagttcagcctggggggtccctgagactctcctgtgcagcctctggattcacctccagtagctactggatgcactgggtccgccaagctccagggaaggggctggtgtgggtctcacgtattaatagtgatgggagtagcacaagctacgcggactccgtgaagggccgattcaccatctccagagacaacgccaagaacacactgtatctgcaaatgaacagtctgagagccgaggacacggctgtgtattactgtgcaaggcccgataggaagtggagtgcttatacactatttgactactggggccagggaacccaggtcaccgtctcctcag

SEQ ID NO: 7127 - DNA, 367 bp, Homo sapiens
caggtgcagctggtggagtctgggggaggcgtggtccagcctgggaggtccctgagactctcctgtgcagcctctggattcaccttcagcaactatggcatgcactgggtccgccaggctccaggcaaggggctggagtgggtggcagttatttcatatgatggaagtaataactattatgcagactccgtgaagggccgattcaccatctccagagacaattccaagaacacgctgtttctgcaaatgaacagcctgagagctgaggacacggctgtgtattactgtgcgaaagatcacgcgggtggctggtacggctttggctttgacaactggggccagggaaccctggtcaccgtctcctcag

SEQ ID NO: 7128 - DNA, 367 bp, Homo sapiens
caggtgcagctggtggagtctgggggaggcgtggtccagcctgggaggtccctgagactctcctgtgcagcctctggattcaccttcagtagctatggcatgcactgggtccgccaggctccaggcaaggggctggagtgggtggcagttatttcatatgatggaagtaataaatactatgcagactccgtgaagggccgattcaccatctccagagacaattccaagaacacgctgtatctgcaaatgaacagcctgagagctgaggacacggctttgtattactgtgcgaaagaaaaagggggtgacttcccgacgccctctcctgactactggggccagggaaccctggtcaccgtctcctcag

SEQ ID NO: 7129 - DNA, 367 bp, Homo sapiens
caggtgcagctggtggagtctgggggaggcgtggtccagcctgggaggtccctgagactctcctgtgcagcctctggattcatcttcagtagctatgctatgcactgggtccgccaggctccaggcaaggggctggagtgggtggcagttatatcacatgatggaagtaataagtactatgcagactccgtgaagggccgattcaccatctccagagacaattccaagaacacgctctatctgcaaatgaacagcctgagagctgaggacacggctgtgtattactgtgcgaccccccgatctctttatatagaagtggtgcactttgactactggggccagggaaccctggtcaccgtctcctcag

SEQ ID NO: 7130 - DNA, 367 bp, Homo sapiens
caggcgcagctggtagagtctgggggaggcgtggtccagcctgggaggtccctgagactctcctgtgcagcctctggattcacattcagtacttatggcatgcactgggtccgccaggctccaggcaaggggctggagtgggtggcaattatatcatatgacggaagtaataaatactatgcagactccgtgaagggccgattcaccatctccagagacaattccaagaacacgctgtatctgcaaatggacagcctgagagctgaggacacggctgtttattactgtgcgaaagatctagtggtttgggagacttatcgtgaagcggactactggggccagggaacccgggtcaccgtctcctcag

SEQ ID NO: 7131 - DNA, 367 bp, Homo sapiens
gaggtgcagctgttggagtctgggggaggtttggtacagcctggggggtccctgagactctcctgtgcagcctctggatttacctttagcggatatgccatgagttgggtccgccaggctccagggaaggggctggagtgggtctcaagtattagttctactggtgctaccagatactacgcagactccgtgaggggccggttcagcatctccagagacaattccaaaaatacgctgtttctgcaaatgaacagcctgagagccgaagacacggccgtatatttctgtgcgagagatcccccctggggaggacgtgaagaggcttttgatatctggggccaagggacaatggtcaccgtctcttcag

SEQ ID NO: 7132 - DNA, 367 bp, Homo sapiens
gaggtgcagctgttggagtctgggggaggcttggtacagcggggggggtccctgagactctcctgtgcagcctctggattcacctttagcacctatgccatgagttgggtccgccaggctccagggaaggggctggagtgggtctcaggtattcgaggtagtggtggtggcacatactacgcagactccgtgaagggccggttcaccatttccagagacaattccaagaacacgctgtattaccaaatgaacagcctgagagccgaggacacggccgtatattactgtgcgaaagatgactacggtgactacgtgatcggcgcttttgatatctggggccaagggacaatggtcaccgtctcttcag

SEQ ID NO: 7133 - DNA, 367 bp, Homo sapiens
caggtgcagctggtggagtctgggggaggcgtggtccagcctgggaggtccctgagactctcctgtacagcctctggattcaccttcagcggctatgctatgcactgggtccgccaggctccaggcagggggctggagtgggtggcagtcatctcatatgatggaattaataaatattacgcagactccgtgaagggccgattcaccatctccagagacaattccaagaacacgctatatctgcaaatgagcagcctgagaggtgaggacacggctgtatattactgtgcgagagatgacgaccaactggaacagaatgagtacttcgatttctggggccgtggcaccctggtcactgtctcctcag

SEQ ID NO: 7134 - DNA, 367 bp, Homo sapiens
caggtgcagctggtgcaatctgggtctgagttgaggaagcctggggcctcagtgagggtttcctgcaaggcttctggatacagcttcactacctatgctatcaattgggtgcgacaggcccctggacaaggtcttgagtggatggggtggatcaacaccaacactgggaacccaacgtatgcccagggcttcacaagacggtttgtcttctccttggacacctctgtcagcacggcatatctgcagatcagcagcctaaaggctgaggacactgccgtgtattactgtgcgagagagattggttgtagtggtgatagctgcttactctccatctggggccaagggacaatggtcaccgtctcttcag

SEQ ID NO: 7135 - DNA, 370 bp, Homo sapiens
cagctgcagctgcaggagtcgggcccaggactggtgaagccttcggagaccctgtccctcacctgcactgtctctggtggctccatcagcagtagtagttactactggggctggatccgccagcccccagggaaggggctggagtggattgggagtatctattatagtgggagcacctactacaacccgtccctcaagagtcgagtcaccatatccgtagacacgtccaagaaccagttctccctgaagctgagctctgtgaccgccgcagacacggctgtgtattactgtgcgagactaagtgggctcagggagttatcactcccctttgactactggggccagggaaccctggtcaccgtctcctcag

SEQ ID NO: 7136 - DNA, 370 bp, Homo sapiens
cagctgcagctgcaggagtcgggcccaggactggtgaagccttcggagaccctgtccctcacctgcactgtctctggtggctccatcagcagtactagttactactggggctggatccgccagcccccagggaaggggctggagtggattgggagtatcttttatagtgggagcacctactacaacccgtccctcaagggtcgactcaacatatcagtagacgcgtccaagaaccaggtctccctgaagctgacctctgtgaccgcagcggacacggccgtttattactgtgcgagatgggggggggactgggacctactttactactttgactactggggccagggaaccctggtcaccgtctcctcag

SEQ ID NO: 7137 - DNA, 370 bp, Homo sapiens
cagctgcagcttctggagtcggggccaggactggtgaagccttcggagaccctgtccctcacctgcactgtctctggtgggtccatcagcagtaatacttattactggggctggatccgccagcccccagggaaggggctggagtggattgggagtgtcttttatagtgggatcacctactacaacccgtccctcaagagtcgagtcaccatctccgtagacacgtccaagaaccagttctccctgaagctgagctctgtgaccgccgcagacacggctgtgtattactgtgcgagacgtctagaagggtatagcagctctttcccctttgactactggggccagggaaccctggtcaccgtctcctcag

SEQ ID NO: 7138 - DNA, 372 bp, Homo sapiens
gaggtgcagctggtggagtctgggggaggcttggtacagccagggcggtccctgagactctcctgtacagcttctggattcacctttggtgattatgctatgagctggttccgccaggctccagggaaggggctggagtgggtaggtttcattagaagcaaagcttatggtgggacaacagaatacgccgcgtctgtgaaaggcagattcaccatctcaagagatgattccaaaagcatcgcctatctgcaaatgaacagcctgaaaaccgaggacacagccgtgtattactgtactagactaagcagctggtactactactactacggtatggacgtctggggccaagggaccacggtcaccgtctcctca

SEQ ID NO: 7139 - DNA, 367 bp, Homo sapiens
gaagtgcagttggtggagtctgggggaggcttggtacagcctggcaggtccctgagactctcctgtgcagcctctggattcacctttgatgattatgccatgcactgggtccggcaagttccagggaagggcctggagttggtctcaagtattagttggaatagtgttagcataggctatggggactctgtgaagggccgattcaccatctccagagacaacgccaagaactccctgtatctgcaaatgaacaggctgagagttgaggacacggccttgtattactgtgcaaaagatatgggcagtggctggtcccttgatgcttttgatatctggggccaagggacaatggtcaccgtctcttcag

SEQ ID NO: 7140 - DNA, 366 bp, Homo sapiens
cagattcaactggtgcagtctggagatgaggtgaagaagcctggggcctcagtgaaggtctcctgcaagtcttctggttacacctttagaaactatggtctcagttgggtgcgacaggcccctggacaagggcttgagtggatggggtggatcagcgcttacaatggtgacacaaactatgcacagaagttccagggcagagtcaccatgaccacagacacatccactaacatagcctacatggacctgaggagcctgagatctgacgacacggccgtgtattactgtgcgagagggggctctttatacagcagcagctggtacatggacgtctggggcaaagggaccacggtcaccgtctcctca

SEQ ID NO: 7141 - DNA, 366 bp, Homo sapiens
gatgtgcagctgttggagtctgggggaggcttggtacagcctggggggtccctgagactctcctgtgcagcctctggatttacctttagcagccatgccatgagctgggtccgccaggctccagggaaggggctggagtgggtctcaactcttagtggcagtggtgttactatatactacgcagactccgtgaagggccggttcaccatctccagagacaattccaagaacacgctgtatctgcaaatgaacagcctgagagccgaggacacggccatatattactgtgcgaaagatggtggcctggaacgcatctactactacatggacgtctggggcaaagggaccacggtcaccgtctcctca

SEQ ID NO: 7142 - DNA, 369 bp, Homo sapiens
cagctgcagctgcaggagtccggctcagggctggtgaagccttcacagaccctgtccctcacctgcgctgtctctggtggctccatcagtagtggtggtttcacctggagctggatccggcagccaccagggaggggcctggagtggattgggttcatctatcattgggggggcacctactacaacccgtccctcaagagtcgagtcaccatatcagtagacaggtccaagaaccagttctccctgaagctgagctctgtgaccgccgcggacacggccgtgtattactgtgccagagagaggggtataactggaactaactactacatggacgtctggggcaaagggaccacggtcaccgtctcctca

SEQ ID NO: 7143 - DNA, 364 bp, Homo sapiens
caggtgcagctacagcagtggggcgcaggactgttgaagccttcggagaccctgtccctcacctgcgctgtctatggtgggtccttcagtggttactactggagctggatccgccagcccccagggaaggggctggagtggattggggaaatcaatcatagtggaagcaccaactacaacccgtccctcaagagtcgagtcaccatatcagtagacacgtccaagaaccagttctccctgaagctgagctctgtgaccgccgcggacacggctgtgtattactgtgcgagaggtagtcagcagtggctggtatttgctgcttttgatatctggggccaagggacaatggtcaccgtctcttcag

SEQ ID NO: 7144 - DNA, 366 bp, Homo sapiens
gaagtgcagctggtgcagtctggagcagaggtgaaaaagcccggggagtctctgaggatctcctgtaagggttctggatacagctttaccagctactggatcagctgggtgcgccagatgcccgggaaaggcctggagtggatggggaggattgatcctagtgactcttataccaactacagcccgtccttccaaggccacgtcaccatctcagctgacaagtccatcagcactgcctacctgcagtggagcagcctgaaggcctcggacaccgccatgtattactgtgcgagacaccggtggctggccccttggtactacggtatggacgtctggggccaagggaccacggtcaccgtctcctca

SEQ ID NO: 7145 - DNA, 366 bp, Homo sapiens
caggtgcagctggtggagtctgggggaggcgtggtccagcctgggaggtccctgagactctcctgtgcagcctctggattcaccttcagttactatgctgtgcactgggtccgccaggctccaggcaaggggctggagtgggtggcagttacatcatatgatggatataataactactacgaggactccgtgaagggccgattcaccatctccagagacaattccaagaacatggtgtatctgcaactgaacagcctgagagctgaggacacggctgtgtattactgtgcgagagattcctgcaactggtgcttctactatgctatggacgtctggggccaagggaccacggtcaccgtctcctca

SEQ ID NO: 7146 - DNA, 366 bp, Homo sapiens
caggtgcagctggtggagtctgggggaggcgtggtccagcctgggaggtccctgagactctcctgtgcagcctctggattcaccttcagtaactatgctatatactgggtccgccaggctccaggcaaggggctggagtgggtggcagttatatcatatgatggatataataaatattatgcagactccgtgaagggccgattcaccatctccagagacaattccaagaacaccctgtatctgcaaatgaacagcctgagagatgaggacacggctctgtattactgtgcgagagatttctgcaactggtgcttctactacggtatggacgtctggggccaagggaccacggtcaccgtctcctca

SEQ ID NO: 7147 - DNA, 367 bp, Homo sapiens
gaggtgcagctggtggagtctgggggagacttggtccagcctggggggtccctgagactctcctgttcagcctctggattcaccttcagtagctttgttgtgtactgggtccgccaggctccagggaagggactggaatatgtttcaggtattagtagtaatgggggtatcacatactacgcagactccgtgaagggcagattcaccatctccagagacaattccaagaacacgctgtatcttcaaatgagcagtctgagagctgaggacacggctgtgtattactgtgtgaaagatttaggagaccagtggctggtggatgtttttgatatctggggccaagggacaatggtcaccgtctcttcag

SEQ ID NO: 7148 - DNA, 366 bp, Homo sapiens
gaggtgcagctggtggagtctgggggaggcctggtcaagcctggggggtccctgagactctcctgtgcagcctctggattcaccttcagtagctatagcatgaactgggtccgccaggctccagggaaggggctggagtgggtctcatccattagtagtagtagtagttacatatactacgcagactcagtgaagggccgattcaccatctccagagacaacgccaagaactcactgtatctgcaaatgaacagcctgagagccgaggacacggctgtgtattactgtgcgtctaactacgttttgaactactactactactacatggacgtctggggcaaagggaccacggtcaccgtctcctca

SEQ ID NO: 7149 - DNA, 367 bp, Homo sapiens
gaggtgcagctggtgcagtctggagcagaggtgaaaaagcccggggagtctctgaagatctcctgtaagggttctggatacagctttaccagctactggatcggctgggtgcgccagatgcccgggaaaggcctggagtggatggggatcatctatcctggtgactctgataccagatacagcccgtccttccaaggccaggtcaccatctcagccgacaagtccatcagcaccgcctacctgcagtggagcagcctgaaggcctcggacaccgccatgtattactgtgcgaccaggggggatgatagtagattccatggtgcttttgatatctggggccaagggacaatggtcaccgtctcttcag

SEQ ID NO: 7150 - DNA, 367 bp, Homo sapiens
gaggtgcaactggagcagtctagagcagaggtgaaaaagcccggggagtctctgaagatctcctgtaagggttctggatacagctttatcagctactggatcggctgggtgcgccagatgcccgggaaaggcctggagtggatggggatcatctatcctggtgactctgataccagatacagcccgtccttccaaggccaggtcaccatctcagccgacaagtccctcagcaccgcctacctgcagtggagcagcctgaaggcctcggacaccgccatgtattactgtatttcaatggattactattattcggggggggccactctcccaatctggggccaagggacaatggtcaccgtctcttcag

SEQ ID NO: 7151 - DNA, 364 bp, Homo sapiens
gaggtgcagctgttggagtctgggggaggcttggtacagcctggggggtccctgagactctcctgtgcagcctctggattcacctttagcagctatgccatgacctgggtccgccgggctccagggaagggactggagtgggtctcaactattagtagtggtagtaccacatactacgcagactccgtgaagggccggttcaccatctccagagacacttccaagaacacggtgtatctgcaaatgaatagcctgagagccgaggacacggccatatatttctgtgcgaaagatctagtggaccagtggcagcaaaaatacttccagcactggggccagggcaccctggtcaccgtctcctcag

SEQ ID NO: 7152 - DNA, 367 bp, Homo sapiens
gaggtgcagctggtgcagtctggagcagaggtgaaaaagcccggggagtctctgaagatctcctgtaagggttctggatacagctttaccagctactggatcggctgggtgcgccagatgcccgggaaaggcctggagtggatggggatcatctatcctggtgactctgataccagatacagcccgtccttccaaggccaggtcaccatctcagccgacaagtccatcagcaccgcctacctgcagtggagcagcctgaaggcctcggacaccgccatgtattactgtgcgagactgggtggagcggtgactagcgctgaatattttcagcactggggccagggcaccctggtcaccgtctcctcag

SEQ ID NO: 7153 - DNA, 366 bp, Homo sapiens
caggtccagctggtacagtctggggctgaggtgaagaagcctggggcctcagtgaaggtctcctgcaaggtttccggatacactctcattgaattatccatgcactgggtgcgacaggctcctggaaaagggcttgagtggatgggaggttttgatcctgaaaatgtcgaaacaatctacgcccagaagttccagggcagagtcaccatgaccgaggacacatctacagacacagcctacatggagctgagcagcctgagatctgaggacacggccgtgtattactgtgtcactacggcggtaaccccttactactactacggtatggacgtctggggccaagggaccacggtcaccgtctcctca

SEQ ID NO: 7154 - DNA, 367 bp, Homo sapiens
caggtgcagctggtggagtctgggggaggcgtggtccagcctgggaggtccctgagactctcctgtgcagcctctggattcaccttcagtagaaatggcatgcactgggtccgccaggctccaggcaaggggctggagtgggtggcagttatatcatatgatggaagtaataaatactatgcagactccgtgaagggccgattcaccatctccagagacaattccaagaacacgctgtatctgcaaatgaacagcctgagagctgaggacacggctgtgtattactgtgcgaaaggaatgtatagcagcagctggtataactggttcgacccctggggccagggaaccctggtcaccgtctcctcag

SEQ ID NO: 7155 - DNA, 367 bp, Homo sapiens
caggtgcaggtggtgcagtctggggctgaggtgaagaagcctggggcctcagtgaaggtttcctgtaaggcatctggatacatcttcaccacctattatatacactgggtgcgacaggcccctggacaagggcttgagtggatgggaataatcaacccaagtgttaatagcacaagctacgcacagaagttccagggcagagtcaccatgaccagcgacacgtccacgagcacagtctacatggagctgagaagcctgagatttgacgacacggccgtttattactgtgcgagagggtggatagcaccagctgctaattcctggttcgacccctggggccagggaaccctggtcaccgtctcttcag

SEQ ID NO: 7156 - DNA, 367 bp, Homo sapiens
caggtgcagctggtgcagtctggggcagaggtgaagaagcctggggcctcagtgaaggtttcctgcaaggcatctacaaacaccttcaccagccactatatacactgggtgcgacaggcccccggacaagggcttgagtggatgggaataatcaaccctagtggtggtagcacaacctacgcacagaagttccagggcagagtcgccatgaccagtgacacgtccacgagcacagtctacatggacctgagcagcctgagatctgacgacacggccgtgtattactgtgcgcgagggggccttgtgccagatgccagcagctggttcgacccctggggccagggaaccctggtcaccgtctcctcag

SEQ ID NO: 7157 - DNA, 366 bp, Homo sapiens
caggtgcagctggtgcagtctggggctgaggtgaagaagcctggggcctcagtgaaggtctcctgtaaggcttctggatacaccttcaccgactattttatatactgggtgcgacaggcccctggacaagggcttgagtgggtgggacggatcaaccctaacagtggtggcacaagctatgcacagaaatttcagggcagggtcaccttgaccagggacacgtccatcagcacagcctacatggagctgaacaggctgagatctgacgacacggccgtgtattactgtcactccctcgtacgcgaccccacctactactactacatggacgtctggggcaaagggaccacggtcaccgtctcctca

SEQ ID NO: 7158 - DNA, 366 bp, Homo sapiens
caggtgcagctggtgcagtctggggctgaggtgaagaagcctggggcctcagtgaaggtctcctgcaaggcttctggatacaccttcaccggctactatatgcactgggtgcgacaggcccctggacaagggcttgagtggatgggacggatcaaccctaacagtggtggcacaaactatgcacagaagtttcagggcagggtcaccatgaccagggacacgtccatcagcacagcctacatggagctgagcaggctgagatctgacgacacggccgtgtattactgtgcgacatggggggtggtttcccagtactactactacatggacgtctggggcaaagggaccacggtcaccgtctcctca

SEQ ID NO: 7159 - DNA, 367 bp, Homo sapiens
gaggtgcagctggtggagtccgggggaggcttagttcagcctggggggtccctgagactctcctgtgcagcctctggattcaccttcagtagctactggatgcactgggtccgccaagttccagggaaggggctggtgtgggtctcacgtattaatattgatgggagaagcacaagctacgcggactccgtgaagggtcgattcaccatctccagagacaacgccaagaacacgctgtatttgcaaatgaacaatctgagccccgaggacacggctgtctattactgtgtaagagggccctctccccctatcaaagacctagggttcgacccctggggccagggaaccctggtcaccgtctcctcag

SEQ ID NO: 7160 - DNA, 369 bp, Homo sapiens
cagatgcagttgcaggagtcgggcccaggactggtcaagccttcggagaccctgtccctcacctgcattgtctctagtggctccatcagtaggactagttacttctggggctgggtccgccagcccccagggatggggctggagtggattgggagtatctattatggtgggaacacctactacaacccgtccctcaagagtcgagtcaccatatcaattgacacgtccaagcaccagttctccctgaacctgacctctgtgaccgcggcggacacggccgtttattactgcgcgagagagcacataacccccttctattactacggtatggacgtctggggccaagggaccacggtcagcgtctcctca

SEQ ID NO: 7161 - DNA, 366 bp, Homo sapiens
cagatgcagctgcaggggtcgggcccaggactggtgaagccttcggagaccctgtccctcacctgcactgtctctggtggctccatcagcagtagtagttactactggggctggatccgccagcccccagggaaggggctggagtggattgggagtatctattatagtgggagcacctactacagcccgtccctcaagagtcgagtctccatatccgttgacacgtccaagaaccagttctccctgaagctgagctctgtgaccgccgcagacacggctgtgtattactgtgcgagacattggggcaataacaactactactactacatggacgtctggggcaaagggaccacggtcaccgtctcc

SEQ ID NO: 7162 - DNA, 367 bp, Homo sapiens
caggtccagctggtacagtctggggctgaggtgaagaagcctggggcctcagtgaaggtctcctgcaaggtttccggatacaccctcactgaattatccatgcactgggtgcgacaggctcctggaaaagggcttgagtggatgggaggttttgatcctgaagatggtgaaacaatctacgcacagaagttccagggcagagtcaccatgaccgaggacacatctacagacacagcctacatggagctgagcagcctgagatctgaggacacggccgtgtattactgtgcaacagcggccgcaatgggcagcagctggtactggttcgacccctggggccagggaaccctggtcaccgtctcctcag

SEQ ID NO: 7163 - DNA, 367 bp, Homo sapiens
gaggtgcagctgttggagtctgggggaggcttgatacagcctggggggtccctgagactctcctgtgcagcctctggattcacctttagcgactatgccatgagctgggtccgccaggctccagggaagggactggagtgggtctcaagtattagtggtagtggtgatagcacatactacgcagactccgtgaagggccggtgcaccatctccagagacaattccaagaaaacgctgtttctgcaaatgaacagcctgagagccgaggacacggccgtatattactgtgcgaagaggctctacggtgactacgttggaggctggttcgacccctggggccagggaaccctggtcaccgtctcctcag

SEQ ID NO: 7164 - DNA, 367 bp, Homo sapiens
gaggtgcagctgttggagtctgggggaggcttggtacagccgggggggtccctgagactctcctgtgcagcctctggattcacctttagcagctttgccatgagctgggtccgccaggctccagggaaggggctggagtgggcctcagctatgagtggtagtggtgatagcacatactacgcagactccgtgaagggccggttcaccatctccagagacaactccaagaacacggtgtctctgcaaatgaacagcctgagagccgaggacacggccgtatattactgtgcgaaagatgccgtattgacccctacgttcaactacttcgacacctggggccagggaatcctggtcaccgtctcctcag

SEQ ID NO: 7165 - DNA, 363 bp, Homo sapiens
caggtgcagctgcaggagtcgggcccaggactggtgaagccttcggagaccctgtccctcacctgcactgtctctggtggctccatcagtagttactactggagctggatccggcagcccccagggaagggactggagtggattgggtatatctattacagtgggagcaccaactacaacccctccctcaagagtcgagtcaccatatcagtagacacgtccaagaaccagttctccctgaagctgagctctgtgaccgctgcggacacggccgtgtattactgtgcgagatgggctacggataggtactactactactacatggacgtctggggcaaagggaccacggtcaccgtctcctca

SEQ ID NO: 7166 - DNA, 376 bp, Homo sapiens
caggtgcagctacagcagtggggcgcaggactgttgaagccttcggagaccctgtccctcacctgcgctgtctatggtgggtccttcagtggttactactggagctggatccgccagcccccagggaaggggctggagtggattggggaaatcaatcatagtggaagcaccaactacaacccgtccctcaagagtcgagtcaccatatcagtagacacgtccaagaaccagttctccctgaagctgagctctgtgaccgccgcggacacggctgtgtattactgtgcgagaaggccctatattgtagtggtggtagctgctacccgaggagagtttgatatctggggccaagggacaatggtcaccgtctcttcag

SEQ ID NO: 7167 - DNA, 382 bp, Homo sapiens
cagctgcagctgcaggagtcgggcccaggactggtgaagccttcggagaccctgtccctcacctgcactgtctctggtggctccatcagcagtaatacttactactggggctggatccgccagcccccagggaaggggctggagtggattgggagtatctattatagtgggagcacctactacaacccgtccctcaagagtcgggtcaccatatcaatagacacgtccaagaaccagttctccctgaagctgagctctgtgaccgcagcggacacggccgtatattactgtgcgagagagacccctggttgtcgtagtggtagctgcccggggggtgcttttgatatctggggccaagggacaatggtcaccgtctcttcag

SEQ ID NO: 7168 - DNA, 367 bp, Homo sapiens
caggtgcagctgcaggagtcgggcccaggactggtgaagccttcggggaccctgtccctcacctgcgctgtctctggtggctccatcagcagtagtaactggtggagttgggtccgccagcccccagggaaggggctggagtggattggggaaatctatcatagtgggagcaccaactacaacccgtccctcaagagtcgagtcaccatatcagtagacaagtccaagaaccagttctccctgaagctgagctctgtgaccgccgcggacacggccgtgtattactgtgcgagaggtaaaggtggtagctgctacggatgctggttcgacccctggggccagggaaccctggtcaccgtctcctcag

SEQ ID NO: 7169 - DNA, 379 bp, Homo sapiens
gaggtgcagctgttggagtctgggggaggcttggtacagcctggggggtccctgagactctcctgtgcagcctctggattcacctttagcagctatgccatgagctgggtccgccaggctccagggaaggggctggagtgggtctcagctattagtggtagtggtggtagcacatactacgcagactccgtgaagggccggttcaccatctccagagacaattccaagaacacgctgtatctgcaaatgaacagcctgagagccgaggacacggccgtatattactgtgcgaaagataatggatatagtggctacgattctttttatagtgatgcttttgatatctggggccaagggacaatggtcaccgtctcttcag

SEQ ID NO: 7170 - DNA, 376 bp, Homo sapiens
caggtgcagctggtgcagtctggggctgaggtgaagaagcctggggcctcagtgaaggtctcctgcaaggcttctggatacaccttcaccgtctactatatgcactgggtgcgacaggcccctggacaagggcttgagtggatgggacggatcaaccctagcagtggtggcacaaactatgcacagaagtttcagggcagggtcaccatgaccagggacacgtccatcagcacagcctacatggagctgagcaggctgagttctgacgacacggccgtgtattactgtgcgagagagagggtctttagcagtggctggtactcaggctcgtgggcttttgatatctggggccaagggacaatggtcaccgtctctt

SEQ ID NO: 7171 - DNA, 379 bp, Homo sapiens
caggtgcagctggtgcagtctggggctgaggtgaagaagcctggggcctcagtgaaggtctcctgcaaggcttctggatacaccttcaccgactactatctgcactgggtgcgacaggcccctggacaagggcttgagtggatgggacggatcaaccctgacagtggtgacacaagctatccacagaagtttcagggcagagtcaccatgaccagggacacgtccatcagcacagcctacatggagctgagcaggctgagatctgacgacacggccgtctattactgtgcgagtgacggtattgttgtaacaccaggtgccacgacccatgatgcttttgatatctggggccgagggacaatggtcaccgtctcttcag

SEQ ID NO: 7172 - DNA, 382 bp, Homo sapiens
caggtgcagctgcaggagtcgggcccaggactggtgaagccttcggagaccctgtccctcacctgcactgtctctggtggctccgtcagcagtggtagttactactggagctggatccggcagcccccagggaagggactggagtggattgggtatatctattacagtgggagcaccaactacaacccctccctcaagagtcgagtcaccatatcagtagacacgtccaagaaccagttctccctgaagctgagctctgtgaccgctgcggacacggccgtgtattactgtgcgactttggtacgttcggatcgtcgaagcagtggctggtatgatgcttttgatatctggggccaagggacaatggtcaccgtctcttcag

SEQ ID NO: 7173 - DNA, 382 bp, Homo sapiens
caggtgcagctgcaggagtcgggcccaggactggtgaagccttcggagaccctgtccctcacctgcactgtctctggtggctccgtcagcagtggtagttactactggagctggatccggcagcccccagggaagggactggagtggattgggtatatctattacagtgggagcaccaactacaacccctccctcaagagtcgagtcaccatatcagtagacacgtccaagaaccagttctccctgaagctgagctctgtgaccgctgcggacacggccgtgtattactgtgcgagagtgcggcagggtcgatatattgtagtggtggaccatgatgcttttgatatctggggccaagggacaatggtcaccgtctcttcag

SEQ ID NO: 7174 - DNA, 364 bp, Homo sapiens
caggtgcagctacagcagtggggcgcaggactgttgaagccttcggagaccctgtccctcacctgcgctgtctatggtgggtccttcagtggttactactggagctggatccgccagcccccagggaaggggctggagtggattggggaaatcaatcatagtggaagcaccaactacaacccgtccctcaagagtcgagtcaccatatcagtagacacgtccaagaaccagttctccctgaagctgagctctgtgaccgccgcggacacggctgtgtattactgtgcgagaaggtatagcagcagctggtacctgaactggttcgacccctggggccagggaaccctggtcaccgtctcctcag

SEQ ID NO: 7175 - DNA, 364 bp, Homo sapiens
caggtgcagctacagcagtggggcgcaggactgttgaagccttcggagaccctgtccctcacctgcgctgtctatggtgggtccttcagtggttactactggagctggatccgccagcccccagggaaggggctggagtggattggggaaatcaatcatagtggaagcaccaactacaacccgtccctcaagagtcgagtcaccatatcagtagacacgtccaagaaccagttctccctgaagctgagctctgtgaccgccgcggacacggctgtgtattactgtgcgagggtattactatggttcggggagtttaactggttcgacccctggggccagggaaccctggtcaccgtctcctcag

SEQ ID NO: 7176 - DNA, 364 bp, Homo sapiens
caggtgcagctacagcagtggggcgcaggactgttgaagccttcggagaccctgtccctcacctgcgctgtctatggtgggtccttcagtggttactactggagctggatccgccagcccccagggaaggggctggagtggattggggaaatcaatcatagtggaagcaccaactacaacccgtccctcaagagtcgagtcaccatatcagtagacacgtccaagaaccagttctccctgaagctgagctctgtgaccgccgcggacacggctgtgtattactgtgcgagagacctagggtatagcagcaggagaggctggttcgacccctggggccagggaaccctggtcaccgtctcctcag

SEQ ID NO: 7177 - DNA, 379 bp, Homo sapiens
caggttcagctggtgcagtctggagctgaggtgaagaagcctggggcctcagtgaaggtctcctgcaaggcttctggttacacctttaccagatatggaatcaactgggtgcgacaggcccctggacaagggcttgaatggatgggatggatcagcgcgtacaatggaaacacaaactatgcacagaagatccagggcagagtcaccatgaccacagacacatccacgagcacagcctacatggagctgaggagcctgagatctgacgacacggccgtatattactgtgcgaggtcaaatattgtagtagtaccaggtgttatgtaccctttcggccttgactattggggccagggaaccctggtcaccgtctcctcag

SEQ ID NO: 7178 - DNA, 379 bp, Homo sapiens
gaagtgcagctggtgcagtctggagcagaggtgaaaaagcccggggagtctctgaggatctcctgtaagggttctggatacagctttaccagctactggatcagctgggtgcgccagatgcccgggaaaggcctggagtggatggggaggattgatcctagtgactcttataccaactacagcccgtccttccaaggccacgtcaccatctcagctgacaagtccatcagcactgcctacctgcagtggagcagcctgaaggcctcggacaccgccatgtattactgtgcgagaccgagaagggatagtagtggttatacttcggggtatgatgcttttgatatctggggccaagggacaatggtcaccgtctcttcag

SEQ ID NO: 7179 - DNA, 379 bp, Homo sapiens
gaggtgcagctggtgcagtctggagcagaggtgaaaaagcccggggagtctctgaagatctcctgtaagggttctggatacagctttaccagctactggatcggctgggtgcgccagatgcccgggaaaggcctggagtggatggggatcatctatcctggtgactctgataccagatacagcccgtccttccaaggccaggtcaccatctcagccgacaagtccatcagcaccgcctacctgcagtggagcagcctgaaggcctcggacaccgccatgtattactgtgcgagactctcgtatagcagtggctggtacggtggtaggagttatacttttgatatctggggccaagggacaatggtcaccgtctcttcag

SEQ ID NO: 7180 - DNA, 379 bp, Homo sapiens
gaggtgcagctggtgcagtctggagcagaggtgaaaaagcccggggagtctctgaagatctcctgtaagggttctggatacagctttaccagctactggatcggctgggtgcgccagatgcccgggaaaggcctggagtggatggggatgatctatcctggtgactctgataccacatacagcccgtccttccaaggccaggtcaccatctcagccgacaagtccatcagaaccgcctacctgcagtggagcagcctgaaggcctcggacaccgccatgtattactgtgcgagatctggttactatgatagtagtggttattttttcaacgcgtgcccagactactggggccagggaaccctggtcagcgtctcctcag

SEQ ID NO: 7181 - DNA, 367 bp, Homo sapiens
caggttcagctggtgcagtctggagctgaggtgaagaagcctggggcctcagtgaaggtctcctgcaaggcttctggttacacctttaccagctatggtatcagctgggtgcgacaggcccctggacaagggcttgagtggatgggatggatcagcgcttacaatggtaacacaaactatgcagagaagctccagggcagagtcaccatgaccacagaaacatccacgagcacagcctacatggagctgaggagcctgagatctgacgacacggccgtgtattactgtgcgagagacagaatagtgggagctccgtataattggttcgacccctggggccagggaaccctggtcaccgtctcctcag

SEQ ID NO: 7182 - DNA, 385 bp, Homo sapiens
gaggtgcagctggtggagtctgggggaggcttggtacagccagggcggtccctgagactctcctgtacagcttctggattcacctttggtgattatgctatgagctggttccgccaggctccagggaaggggctggagtgggtaggtttcattagaagcaaagcttatggtgggacaacagaatacgccgcgtctgtgaaaggcagattcaccatctcaagagatgattccaaaagcatcgcctatctgcaaatgaacagcctgaaaaccgaggacacagccgtgtattactgtactaggccaacgaaaagggattactatggttcggggagttattccccatttgactactggggccagggaaccctggtcaccgtctcctcag

SEQ ID NO: 7183 - DNA, 379 bp, Homo sapiens
gaggtgcagctggcggagtctgggggaggcttggtccagcctggggggtccctgagactctcctgtgcagcctctggattcacgtttagtatgttttggatgagttgggtccgccaggctccagggaaggggctggagtgggtggccaacataaagcaagatggaagtgagaaatactatgtggactctgtgaggggccgattcaccatctccagagacaacgccaagaactcactgtatctgcaattgaacagcctgagagccgaggacacggccgtgtattactgtgcgagagacgcggaagatattttgactggtaattatggcccaaactactttgactactggggccagggaaccctggtcaccgtctcctcag

SEQ ID NO: 7184 - DNA, 382 bp, Homo sapiens
caggtgcaactgcaggagtcgggcccaggactggtgacgccttcggggaccctgtccctcacctgcgatgtctctggtggctccatcatcagtagtagtaactggtggagttgggtccgccagcccccagggaaggggctggagtggcttggagaaatctattatagtgggaccaccaactacaatttgtccctcaagagtcgactcatcatatcagtagacaagtccaagaaccagttctccctgaggctgagctccgtgaccgccgcggacacggccgtctattactgtgcgaggggaagatattgtagtactatcagttgctacgggccacagacttttgatgtctggggccaagggacaatggtcaccgtctcttcag

SEQ ID NO: 7185 - DNA, 379 bp, Homo sapiens
gaggtgcagctggtggagtctgggggaggtgtggtacggcctggggggtccctgagactctcctgtgcagcctctggattcacctttgatgattatggcatgagctgggtccgccaagctccagggaaggggctggagtgggtctctggtattaattggaatggtggtagcacaggttatgcagactctgtgaagggccgattcaccatctccagagacaacgccaagaactccctgtatctgcaaatgaacagtctgagagccgaggacacggccttgtattactgtgcgaccgcccaatatgattacatttgggggagttatcgtgcggggtactttgactactggggccagggaaccctggtcaccgtctcctcag

SEQ ID NO: 7186 - DNA, 379 bp, Homo sapiens
caggtgcagctggtggagtctgggggaggcgtggtccagcctggggggtccctgagactctcctgtgcagcctctggattcaccttcattaactatgctatgcactgggtccgccaggctccaggcaaggggctggagtgggtggcagttatatcatataatggaaataataaatactacgcagactccgtgaagggccgattcaccatctccagagacaattccaagaacaccctgtatctgcaaatgagcagcctgcgagctgaggaaacggctgtgtactactgtgcgagagaaacggccccgctgggttactatggttcggggacttcagacattgactactggggccagggaaccctggtcaccgtctcctcag

SEQ ID NO: 7187 - DNA, 379 bp, Homo sapiens
caggtgcagctggtggagtctgggggaggcgtggtccagcctgggaggtccctgagactctcctgtgcagcttctggattcaccttcagtaactatggcatgcactgggtccgccaggctccaggcaaggggctggagtgggtggcagttatatcatatgatggaactaataaatactatgtagactccgtgaagggccgattcaccatctccagagacaattccaagaacacgttgtatctgcaaatgaacagcctgagagctgaggacacggctgtgtattactgtgcgaaaggggtagaagctggtatgggtcggttttttcgttcggactactttgactactggggccagggaaccctggtcaccgtctcctcag

SEQ ID NO: 7188 - DNA, 377 bp, Homo sapiens
caggtgcagctggtggagtctgggggaggcgtggtccagcctgggaggtccctgagactctcctgtgcagcctctggattcaccttcagtagttatgctatgcactgggtccgccaggctccaggcaaggggctggagtgggtggcacttatatcatatgatggaagtaataaatactacgcagactccgtgaagggccgattcaccatctccagagacaattccaagaacacgctgtatctgcaaatgaacagcctgagagctgaggacacggctgtgtatcactgtgcgagagatggaggaggggtagtatggttcggggagttattggcttactttgactactggggccagggaaacctggtcaccgtctcctc

SEQ ID NO: 7189 - DNA, 379 bp, Homo sapiens
gaggtgcagctggtggagtccgggggaggcttagttcagcctggggggtccctgagactctcctgtgcagcctctggattcaccttcagtagctactggatgcactgggtccgccaagctccagggaaggggctggtgtgggtctcacttattaatagtgatgggagtagcacaagctacgcggactccgtgaagggccgattcaccatctccagagacaacgccaagaacacgctgtatctgcaaatgaatagtctgagagccgaggacacggctgtatattactgtgcaagagatccaggaccaacgtattactatgatagacgggggtactactttgactactggggccagggaaccctggtcaccgtctcctcag

SEQ ID NO: 7190 - DNA, 379 bp, Homo sapiens
caggtgcagctggtgcagtctggggctgaggtgaagaagcctggggcctcagtgaaggtttcctgcaaggcatctggatacaccttcaccagctactatatgcactgggtgcgacaggcccctggacaagggcttgagtggatgggtataatcaaccctagtggtggtagcacaagttacgcacagaagttccagggcagagtcaccatgaccagggacacgtccacgagcacagtctatatggagctgagcagcctgagatctgaggacacggccgtgtattactgtgcgagagatacggcatattgcagtggtggtagctgctacgcggttgggttcgacccctggggccagggaaccctggtcaccgtctcctcag

SEQ ID NO: 7191 - DNA, 376 bp, Homo sapiens
gaggtgcagctggtggagtctgggggaggcttggtacagcctggggggtccctgagactctcctgtgcagcctctggattcaccttcagtagctacgacatgcactgggtccgccaagctacaggaaaaggtctggagtgggtctcagctattggtactgctggtgacacatactatccaggctccgtgaagggccgattcaccatctccagagaaaatgccaagaactccttgtatcttcaaatgaacagcctgagagccggggacacggctgtgtattactgtgcaagagggttgcaggagctggtacagggtcggttttatgagtactactttgactactggggccagggaaccctggtcaccgtctcctcag

SEQ ID NO: 7192 - DNA, 379 bp, Homo sapiens
gaggtgcagctggtggagtctgggggaggcctggtcaagcctggggggtccctgagactctcctgtgcagcctctggattcaccttcagtagctatagcatgaactgggtccgccaggctccagggaaggggctggagtgggtctcatccattagtagtagtagtagttacatatactacgcagactcagtgaagggccgattcaccatctccagagacaacgccaagaactcactgtatctgcaaatgaacagcctgagagccgaggacacggctgtgtattactgtgcgagagattgggactctcttgtagtggtggtagctgctactacggggtttgactactggggccagggaaccctggtcaccgtctcctcag

SEQ ID NO: 7193 - DNA, 328 bp, Homo sapiens
tgagactctcctgcaaagcctctggtttcacctttactggttacagcatgagcttggtccagcacgcttcacaacagggataggtgtgggtgccaacagtgagtgatcaagtatgaattctcagggttactctccatgagtacaaataaattaacaatctcaagcaacacccttttaagtgcagtctgccttacaatgaccaatctgaaagccaaggacaaggtcatgtattactgtgagtgtaacctcggaccgtattgtagtagtaccagctgccagtactactttgactactggggccagggaaccctggtcaccgtctcctcag

SEQ ID NO: 7194 - DNA, 379 bp, Homo sapiens
gaggtgcagctgttggagtctgggggaggcttggtacagcctggggggtccctgagactctcctgtgcagcctctggattcacctttagcagctatgccatgagctgggtccgccaggctccagggaaggggctggagtgggtctcagctattagtggtagtggtggtagcacatactacgcagactccgtgaagggccggttcaccatctccagagacaattccaagaacacgctgtatctgcaaatgaacagcctgagagccgaggacacggccgtatattactgtgcgaaagatcataggagggactacggtgactacgcgtccccttactactttgactactggggccagggaaccctggtcaccgtctcctcag

SEQ ID NO: 7195 - DNA, 379 bp, Homo sapiens
gaggtgcagctgttggagtctgggggaggcttggtacagcctggggggtccctgagactctcctgtgcagcctctggattcacctttagcagctatgccatgagctgggtccgccaggctccagggaaggggctggagtgggtctcagctattagtggtagtggtggtagcacatactacgcagactccgtgaagggccggttcaccatctccagagacaattccaagaacacgctgtatctgcaaatgaacagcctgagagccgaggacacggccgtatattactgtgcgaaatcgcgggtgtggagttactatgatagtagtggttatttggactttgactactggggccagggaaccctggtcaccgtctcctcag

SEQ ID NO: 7196 - DNA, 382 bp, Homo sapiens
cagctgcagctgcaagagtcgggcccaggcctggtgaagcctgcggagaccctgtcactcacctgcactgtcactggtggctccattagtagtaggagttactactggggctggatccgccagcccccagggaaggggctggagtggattggaagtatctattatagtacaaacacctactacaaccagtccctcaagagtcgagtcaccatatcaatagacacgtccaagagccagttctccctgaggttgagctctgtgaccgcagcggacacggccgtgtattactgtgcgagagctgaaaggacggtgttacttccagctgccggcggtcgctggttcgacccctggggccagggaaccctggtcaccgtctcctcag

SEQ ID NO: 7197 - DNA, 379 bp, Homo sapiens
gaggtgcagctggtgcagtctggagcagaggtgaaaaagcccggggagtctctgaagatctcctgtaagggttctggatacagctttagcacttactggatcgcctgggtgcgccagatgcccgggaaaggcctggagtggatggggatcatctatcctggtgactctgataccagatacagcccgtccttccaaggccaggtcaccatctcagccgacaagtccatcagcaccgcctacctgcagtggagcagcctgaaggcctcggacaccgccatgtattactgtgcgaggggggattgtagtactaccacctgcctccaccccttagggaggttcgacccctggggccagggaaccctggtcaccgtctcctcag

SEQ ID NO: 7198 - DNA, 379 bp, Homo sapiens
gaggtgcagctggtggagtctgggggaggcttggtacagcctggggggtccctgagactctcctgtgcagcctctggattcaccttcagtagctatagcatgaactgggtccgccaggctccagggaaggggctggagtgggtttcatacattagtagtagtagtagtaccatatactacgcagactctgtgaagggccgattcaccatctccagagacaacgccaagaactcactgtatctgcaaatgaacagcctgagagccgaggacacggctgtgtattactgtgcgagagatggggccgtaacgtattactatgatagtagtggttatccctttgactactggggccagggaaccctggtcaccgtctcctcag

SEQ ID NO: 7199 - DNA, 376 bp, Homo sapiens
caggtgcagctacagcagtggggcgcaggactgttgaagccttcggagaccctgtccctcacctgcgctgtctatggtgggtccttcagtggttactactggagctggatccgccagcccccagggaaggggctggagtggattggggaaatcaatcatagtggaagcaccaactacaacccgtccctcaagagtcgagtcaccatatcagtagacacgtccaagaaccagttctccctgaagctgagctctgtgaccgccgcggacacggctgtgtattactgtgcgagaggcaaagagtatggttcggggagttattataagaagggctggttcgacccctggggccagggaaccctggtcaccgtctcctcag

SEQ ID NO: 7200 - DNA, 376 bp, Homo sapiens
caggtgcagctacagcagtggggcgcaggactgttgaagccttcggagaccctgtccctcacctgcgctgtctatggtgggtccttcagtgattactactggagctggatccgccagcccccagggagggggctggagtggattggggaaatcaatcatagtggaagcaccacctacaggccgtccctcaagagtcgagtcaccatatcagtagacacgtccaagaaccagttctccctgaaactgagctctgtgaccgccgcggacacggctgtgtattactgtgcgagagcgcgctatgtttttggagtggttatcaaaccgtacaactggttcgacccctggggccagggaaccctggtcaccgtctcctcag

SEQ ID NO: 7201 - DNA, 334 bp, Homo sapiens
ggcctcagtgaaggtgtcctgcaaagctctggatacaccttcgccagctacgacattcactgtgtgtgacaggcccctggataagggtttgaatggatggtagggagctactctggcaatggtaacacaggctatgcacagaagtttcagggcagagtcaccatgaccagggacacgtccacgagcacagcctacatggagctgagcagtcagagatctgaggacatagatgtgtactactgtgcgagaccagcctccacggggactgatacgtttttacaccattactactttgactactggggccagggaaccctggtcaccgtctcctcag

SEQ ID NO: 7202 - DNA, 377 bp, Homo sapiens
ggtgcagctgacggagtctgggggaggcgtggtccagcctggggggtccctgagactctcctgtgcagcctctggattcaccttcaggaaccatggcatgcactgggtccgccagcctccaggcagggggctggagtgggtggcaattatctcatatgatggcagaagtcaattatacaatgactccgtgaagggccgattcaccatctccagagacaattccaggaacacgctgtatctgcaaatggacaacgtgaaagttgacgacgcggctatttatttttgtgtgaccgggaacgaacatggtatatggagttcttattatcaaaactggttcgacccctggggccagggcaccctggtcaccgtctcctcag

SEQ ID NO: 7203 - DNA, 378 bp, Homo sapiens
gaggtgcagctgttggagtctgggggaggcttggtacagcctggggggtccctgagactctcctgtgcagcctctggattcacctttagcagctatgccatgagttgggtccgccaggctccagggaaggggctggagtgggtctcaggtattagtggtagtggtggtagcacattctacgcagactccgtgaagggccggttcgccatctccagagacaattccaagaacacgctgtatctgcaaatgaacagcctgagagccgaggacacggccgtatattactgtgcgaaaggccatagtggctacgatttggcctactactacttctactgcatggacgtctggggcaaagggaccacggtcaccgtctcctca

SEQ ID NO: 7204 - DNA, 376 bp, Homo sapiens
caggtgcagctgcaggagtcgggcccaggactggtgaagccttcggagaccctgtccctcacctgcactgtctctggtggctccatcagtagttactactggagctggatccggcagcccccagggaagggactggagtggattgggtatatctattacagtgggagcaccaactacaacccctccctcaagagtcgagtcaccatatcagtagacacgtccaagaaccagttctccctgaagctgagctctgtgaccgctgcggacacggccgtgtattactgtgcgaggtggggctatagcagcagctggtatggacgaggggggaactggttcgacccctggggccagggaaccctggtcaccgtctcctcag

SEQ ID NO: 7205 - DNA, 376 bp, Homo sapiens
caggtgcagctgcaggagtcgggcccaggactggtgaagccttcggagaccctgtccctcacctgcactgtctctggtggctccatcagtagttactactggagctggatccggcagcccccagggaagggcctggagtggattggatacatattttatagtgtaaccaccaactacaatccctccctcaagagtcgagtcaccatatcaggagacaagtccaagaaccagatctccctgaagttgagttctgtgaccgccgcagacacggccgtgtattactgtgcgagacagaataattactatgatagtagtggtcccccccccaactggttcgacccctggggccagggaaccctggtcaccgtctcctcag

SEQ ID NO: 7206 - DNA, 381 bp, Homo sapiens
cagctgcagctgcaggagtcgggcccaggactggtgaagccttcggagaccctgtccctcacctgcactgtctctggtggctccatcagcagtagtaattactactggggctggatccgccagcccccagggaaggggctggagtggattgggagtatcttttatagtgggagcacctactacaacccgtccctcaagagtcgagtcaccatatccgttgacacgtccaagaaccagttctccctgaagctgagctctgtgaccgccgcagacacggctgtgtattactgtgcgagacagggtctagcagtggctggagttttgactccttactactacatgggcgtctggggcaaagggaccacggtcaccgtctcctca

SEQ ID NO: 7207 - DNA, 378 bp, Homo sapiens
gaggtgcagctggtgcagtctggggctgaggtgagaaagcccggggagtctctgacgatctcctgtaaggtttttggatacacgtttaccacttcctggatcggctgggtgcgccagatgcccgggaaaggcctggagtggatggggatcatctatcctgatgactctgataccagatacagcccgtccttccaaggccaagtcagcatctcagccgacaagtccatcaacaccgcctacctgcagtggagcagcctgaaggcctcggacaccgccatgtattactgtgcgagacatcttaactcggcagagggaggtattaactacttctacgccatggacgtctggggccaagggaccccggtcaccgtctcctca

SEQ ID NO: 7208 - DNA, 378 bp, Homo sapiens
gaggtgcagctggtgcagtctggagcagaggtgaaaaagcccggggagtctctgaagatctcctgtaagggttctggatacagctttaccagctactggatcggctgggtgcgccagatgcccgggaaaggcctggagtggatggggatcatctatcctgatgactctgataccagatacagcccgtccttccaaggccaggtcaccatctcagccgacaagtccatcagcaccgcctacctgcagtggagcagcctgaaggcctcggacaccgccatgtattactgtgcgagggaacgtaccgggtatagcagtggctggtactactactacggtatggacgtctggggccaagggaccacggtcaccgtctcctca

SEQ ID NO: 7209 - DNA, 378 bp, Homo sapiens
gaggtgcagctggtgcagtctggagcagaggtgaaaaagcccggggagtctctgaagatctcctgtaagggttctggatacagctttaccacccactggatcggctgggtgcgccagatgcccgggaaaggcctggagtggatggggatcatctatcctggtgactctgataccagatacagcccgtccttccaaggccaggtcaccatctcagccgacaagtccatcagcaccgcctacctgcagtggagcagcctgaaggcctcggacaccgccatgtatttctgtgcgagactgggtgggggagtggtgccgcactactactactactactacatggacgtctggggcgaagggaccacggtcaccgtctcctca

SEQ ID NO: 7210 - DNA, 384 bp, Homo sapiens
gaggtgcagctggtggagtctgggggaggcttggtaaagcctggggggtcccttagactctcctgtgcagcctctggattcactttcagtaacgcctggatgagctgggtccgccaggctccagggaaggggctggagtgggttggccgtattaaaagcaaaactgatggtgggacaacagactacgctgcacccgtgaaaggcagattcaccatctcaagagatgattcaaaaaacacgctgtatctgcaaatgaacagcctgaaaaccgaggacacagccgtgtattactgtaccgccccaatagcagagatggctacaattccctactactactacggtatggacgtctggggccaagggaccacggtcaccgtctcctca

SEQ ID NO: 7211 - DNA, 384 bp, Homo sapiens
gaggtgcagctggtggagtctgggggaggcttggtaaagcctggggggtcccttagactctcctgtgaagtctctggattcactttcagtgacgcctggatgacctgggtccgccaggctccagggaaggggctggagtgggttggccgtattaaaagccaaattgatggtgggacaacagactacgctgcacccgtgaaaggcagattcaccatttcaagagatgattcaaaatacacgctgtatctgcaaatgaacagcctgaaaaccgatgacacagccgtatattactgtaccacctgccgctggggagttattataagcgaccactactactacgctatggacgtctggggccaagggaccacggtcaccgtctcctca

SEQ ID NO: 7212 - DNA, 378 bp, Homo sapiens
gaggtgcagctggtggagtctgggggaggtgtggtacggcctggggggtccctgagactctcctgtgcagcctctggattcacctttgatgattatggcatgagctgggtccgtcaagctccagggaaggggctggagtgggtctctggtattaattggaatggtggtagaacagggtatgcagactctgtgaagggccgattcaccatctccagagacaacgccaagaactccctgtatctgcaaatgagcagtctgagagccgaggacacggccttgtattactgtgcgagagatcacctattacgatattttgaccacgactactactacggtatggacgtctggggccaagggaccaccgtcaccgtctcctca

SEQ ID NO: 7213 - DNA, 378 bp, Homo sapiens
caggtgcagctggtggagtctgggggaggcgtggtccagcctgggaggtccctgagactctcctgtgcagcctctggattcaccttcagtagctatgctatgcactgggtccgccaggctccaggcaaggggctggagtgggtggcagttatatcatatgatggaagtaataaatactacgcagactccgtgaagggccgattcaccatctccagagacaattccaagaacacgctgtatctgcaaatgaacagcctgagagctgaggacacggctgtgtattactgtgcgagagatctgggtatagcagtggctcaacgggactactactacggtatggacgtctggggccaagggaccacggtcaccgtctcctca

SEQ ID NO: 7214 - DNA, 378 bp, Homo sapiens
caggtgcagctggtggagtctgggggaggcgtggtccagcctgggaggtccctgagactctcctgtgcagcctctggattcaccttcggaagttatggcatgcactgggtccgccaggctccaggcaaggggctggattgggtggcagttatatcatattatggaagtaataaatattatgcagactccgtgaagggccgattcaccatctccagagacaattcccagaacacgctgtatctgcaaatgaacagcctgagagctgaggacacggctgtgtattactgtgcgaaagataggcacggattttgtagtgataccagctgctactactacatggacgtctggggcaaagggaccacggtcaccgtctcctca

SEQ ID NO: 7215 - DNA, 379 bp, Homo sapiens
gaggtgcagctggtggagtctgggggaggcctggtcaagcctggggggtccctgagactctcctgtgcagcctctggattcaccttcagtagctatagcatgaactgggtccgccaggctccagggaaggggctggagtgggtctcatccattagtagtagtagtagttacatatactacgcagactcagtgaagggccgattcaccatctccagagacaacgccaagaactcactgtatctgcaaatgaacagcctgagagccgaggacacggctgtgtattactgtgcgagagattcaggatattgtagtggtggtagctgctactccggctggttcgacccctggggccagggaaccctggtcaccgtctcctcag

SEQ ID NO: 7216 - DNA, 379 bp, Homo sapiens
caggtgcagctgctggagtctgggggaggcgtggtccagcctgggaggtccctgagactctcctgtgcagcctctggattcaccttcagtagctatgctatgcactgggtccgccaggctccaggcaaggggctggagtgggtggcagttatatcatatgatggaagcaataaatactacacagactccgtgaagggccgattcaccatctccagagacaattccaagaacacactgtatctgcaaatgaacagcctgagagctgaggacacggctgtgtattactgtgcgagagatcctatactcgccgtaactggggatcagactggctggtacttcgatctctggggccgtggcaccctggtcactgtctcctcag

SEQ ID NO: 7217 - DNA, 378 bp, Homo sapiens
gaggtgcagctggtggagtctgggggaggcttgatacagcctggggggtccctgagactctcctgtgcagcctctggattcaccttcagtagctttagcatgaactgggtccgccaggctccagggaaggggctggattgggtttcatacattagtagttatagtagtaccatatactacgcagactctgtgaagggccgattcaccatctccagggacaacgccaagaactcactgtatctgcaaatgaacagcctgagagccgaggacacggctgtgtattactgtgcgggaggtcagtacaactggaacgagcgcctgaaccctggctacggtatggacgtctggggccaagggaccacggtcaccgtctcctca

SEQ ID NO: 7218 - DNA, 353 bp, Homo sapiens
caggtccagcttgtgcagtctggggctgaggtgaagaagcctggggcctcagtgatggtttcctgcaaggcctctggatacaccttcactagttatcctatgcattgggtgcgccaggcccccggacaaaggcttgagtggatgggatggatcaacgctggcattactaacacaaaatgttcacagaagttccaaggcagagtcaccattaccagggacacatccgcgagcgcagcctacatggaactgagcagcctgagatctgaagacacggctgtgtattactgtgcgagacgaggaatcaatatcgcctattccctccggccagggaaccctggtcaccgtctcctcag

SEQ ID NO: 7219 - DNA, 379 bp, Homo sapiens
caggtgcagctggtggagtctgggggaggcgtggtccagcctgggaggtccctgagactctcctgtgcagcctctggattcaccttcagtagctatggcatgcactgggtccgccaggctccaggcaaggggctggagtgggtggcagttatatcatatgatggaagtaataaatactatgcagactccgtgaagggccgattcaccatctccagagacaattccaagaacacgctgtatctgcaaatgaacagcctgagagctgaggacacggctgtgtattactgtgcgaaagatggccccgcccattacgatttttggagtgggtccaggtacttcgatctctggggccgtggcaccctggtcactgtctcctcag

SEQ ID NO: 7220 - DNA, 355 bp, Homo sapiens
caggtgcagctggtgcagtctggggctgaggtgaagaagcctggggcctcagtgaaggtttcctgcaaggcatctggatacaccttcgccagctactatatgcactgggtgcgacaggcccctggacaagggcttgagtggatgggaataatcaaccctagtggtggtagcacaacctacgcacagaagttccagggcagagtcaccatgaccagggacacgtccacgagcacagtctacatggagctgagcagcctgagatctgaggacacggccgtgtatttctgtgcgagagagggaaccatgactacatgggtctactggggccagggaaccctggtcaccgtttcttcag

SEQ ID NO: 7221 - DNA, 358 bp, Homo sapiens
cagatcaccttgaaggagtctggtcctacgttggtgaaacccacacagaccctcacgctgacctgcaccttctctgggttctcactcagcactagtggagtgggtgtgggctggatccgtcagcccccaggaaaggccctggagtggcttgcactcatttattgggatgatgataagcgctacagcccatctctgaagagcaggctcaccatcaccaaggatacctccaaaaatcaggtggtccttacaatgaccaacatggaccctgtggacacagccacatattactgtgcacacctcacccctataatcggatttgactactggggccagggaaccctggtcaccgtctcctcag

SEQ ID NO: 7222 - DNA, 379 bp, Homo sapiens
gaggtgcagctggtggagtctgggggaggcttggtccagcctggggggtccctgagactctcctgttcagcctctggattcaccttcagtagctatgctatgcactgggtccgccaggctccagggaagggactggaatatgtttcagctattagtagtaatgggggtagcacatactacgcagactccgtgaagggcagattcaccatctccagagacaattccaagaacacgctgtatcttcaaatgagcagtctgagagctgaggacacggctgtgtattactgtgtgaaaggtggatactatggttcggggagttattataccgctgaatacttccagcactggggccagggcaccctggtcaccgtctcctcag

SEQ ID NO: 7223 - DNA, 355 bp, Homo sapiens
gaggtgcagctggtggagtctgggggaggcttggtacagcctggggggtccctgagactctcctgtgcaggctctggattcaccttcagtagttacagcatgaactgggtccgccaggctccagggaaggggctggagtgggtttcatacattagtagtagtagtagcaccatatactacgcagactctgtgaagggccgattcaccatctccagagacaatgccaagaactcactgtatctgcaaatgaacagcctgagagacgaggacacggctgtgtattactgtgcgagagtgaccctcggcaactggttcgacccctggggccagggaaccctggtcaccgtctcctcag

SEQ ID NO: 7224 - DNA, 355 bp, Homo sapiens
gaggtgcagctggtggagtctgggggaggcttggtccagcctggggggtccctgagactctcctgtgcagcctctggattcacctttagtagctattggatgagctgggtccgccaggctccagggaaggggctggagtgggtggccaacataaagcaagatggaagtgagaaatactatgtggactctgtgaagggccgattcaccatctccagagacaacgccaagaactcactgtatctgcaaatgaacagcctgagagccgaggacacggccgtgtattactgtgcgagccatagcagtggctggttctttgactactggggccagggaaccctggtcaccgtctcctcag

SEQ ID NO: 7225 - DNA, 355 bp, Homo sapiens
gaggtgcagctggtggagtctgggggaggcttggtccagcctggggggtccctgagactctcctgtgcagcctctggattcacctttagtagctattggatgagctgggtccgccaggctccagggaaggggctggagtgggtggccaacataaagcaagatggaagtgagaaaaactatgtggactctgtgaagggccgattcaccatctccagagacaacgccaagaactcactgtatctgcaaatgaacagcctgagagccgaggacacggctgtgtattactgtgcgaaaactggaactatggactactttgactactggggccagggaaccctggtcaccgtctcctcag

SEQ ID NO: 7226 - DNA, 378 bp, Homo sapiens
caggtgcagctgcaggagtcgggcccaggactggtgaagccttcggggaccctgtccctcacctgcgctgtctctggtggctccatcagcagtagtaactggtggagttgggtccgccagcccccagggaaggggctggagtggattggggaaatctatcatagtgggagcaccaactacaacccgtccctcaagagtcgagtcaccatatcagtagacaagtccaagaaccagttctccctgaagctgagctctgtgaccgccgcggacacggccgtgtattactgtgcgacccgctggggagggggtattacgatattttctggccgctactacatggacgtctggggcaaagggaccacggtcaccgtctcctca

SEQ ID NO: 7227 - DNA, 358 bp, Homo sapiens
caggtgcagctgcaggagtcgggcccaggactggtgaagccttcacagaccctgtccctcacctgcactgtctctggtggctccatcagcagtggtgattactactggagttggatccgccagcccccagggaagggcctggagtggattgggtacatctattacagtgggagcaccttcttcaacccgtccctcaagagtcgagttttcatatcagtagacacgtccaagaaccagttctctctgaagctgagctctgtgactgccgcagacacggccgtgtacttctgtgccagagtggatacagctatgattgcggacaactggggccagggaaccctggtcatcgtctcctcag

SEQ ID NO: 7228 - DNA, 358 bp, Homo sapiens
caggtcaccttgaaggagtctggtcctgcgctggtgaaacccacagagaccctcacactgacctgcaccttctctgggttctcactcagaactagggaagtgcgtgtgagctggatccgtcagcccccagggaaggccctggagtggcttgcacgcattgattgggatggtgagaaattctacagcacatctctaaggaccaggctcaccatctccaaggacacctccaaaaatcaggtggtccttaaaatgaccaacatggaccctgtggacacagccacttactactgtgcacggggtgtgactggactccactttgactactggggccagggaaccctggtctccgtctcctcag

SEQ ID NO: 7229 - DNA, 379 bp, Homo sapiens
caggtgcagctgcaggagtcgggcccaggactggtgaagccttcggggaccctgtccctcacctgcgctgtctctggtggctccatcagcagtagtaactggtggagttgggtccgccagcccccagggaaggggctggagtggattggggaaatctatcatagtgggagcaccaactacaacccgtccctcaagagtcgagtcaccatatcagtagacaagtccaagaaccagttctccctgaagctgagctctgtgaccgccgcggacacggccgtgtattactgtgcgagagattacctctacccctcagtggcccagagggccagggggtacttccagcactggggccagggcaccctggtcaccgtctcctcag

SEQ ID NO: 7230 - DNA, 352 bp, Homo sapiens
caggtgcagctgcaggagtcgggcccaggactggtgaagccttcggagaccctgtccctcacctgcactgtctctggtacctccatcagtagttactactggagctggatccggcagcccccagggaagggactggagtggattgggtatatgtattacagtgggactaggaactacaacccctccctcaagagtcgagtcaccatatcagtagacacgtccaagaaccagttctccctgaagctgagctctgtgaccgctgcggacacggccgtgtattactgtgcgaggttgaagggaggagctcgtcttgactactggggccagggaaccctggtcaccgtctcctcag

SEQ ID NO: 7231 - DNA, 352 bp, Homo sapiens
caggtgcagctgcaggagtcgggcccaggactggtgaagccttcggagaccctgtccctcacctgcactgtctctggtggctccatcagtagtttctactggacctggatccggcagcccccagggaagggactggagtggattgggtatatctattacagtgggagcaccagctacaacccctccctcaagagtcgagtcgccatatcagtagacacgtccaagaaccagttctccctgaacctgagctctgtgaccgctgcggacacggccgtgtattactgtgcggggaggagtagtacccacgaggttgactactggggccagggaaccctggtcaccgtctcctcag

SEQ ID NO: 7232 - DNA, 358 bp, Homo sapiens
cagctgcagctgcaggagtcgggcccaggactggtgaagccttcggagaccctgtccctcacctgcactgtctctggtggctccatcagcactattagttactactggggctggatccgccagcccccagggaaggggctggagtgggttgcgagtatctattatagtgggagcacctactacaatccgtccctcaagagtcgagtcaccgtatcggtagacacgtccaagaaccagttctccctgaagctgacctctgtgaccgcagcggacacggccgtgtattactgtgcgaggggaggatatagtggatactttgactactggggccagggaaccctggtcaccgtctcctcag

SEQ ID NO: 7233 - DNA, 358 bp, Homo sapiens
cagctgcagctgcaggagtcgggcccaggactggtgaagccttcggagaccctgtccctcacctgcactgtctctggtggctccatcagcagtagtacttactactggggctggatccgccagcccccagggaaggggctggagtggattgggagtatctattatgctgggagcacctactacaacccgtccctcaagagtcgagtcaccatgtccgtagacacgtccaagagccagttctccctgaggctgagctctgtgaccgccgcagacacggctgtatattactgtgcgagacattcgacaacttggggatttgactactggggccagggaaccctggtcaccgtctcctcag

SEQ ID NO: 7234 - DNA, 358 bp, Homo sapiens
cagctgcagctgcaggagtcgggcccaggactggtgaagccttcggagaccctgtccctcacctgcagtgtctctggtgactccatcagcagtagtaattactactggggctggatccgccagcccccagggaaggggctggagtggattgggagtatctattatagtgggagcacctaccacagcccgtccctcaacagtcgagtcaccatatcagtagacacgtccaagaaccacgtctccctgaagctgagctctgtgaccgcagcggacacggccgtgtattactgtgcgaagaataacgatataacctggttcgacccctggggccagggaaccctggtcaccgtctcctcag

SEQ ID NO: 7235 - DNA, 358 bp, Homo sapiens
cagctgcagctgcaggagtcgggcccaggactggtgaagccttcggagaccctgtccctcacctgcactgtctctggtggctccatcagcagtagtagttactactggggctggatccgccagcccccagggaaggggctggagtggattgggagtatctattatagtgggagcacctactacaacccgtccctcaagagtcgagtcaccatatccgtagacacgtccaagaaccagttctccctgaagctgagctctgtgaccgccgcagacacggctgtgtattactgtgcgagactctcctcgagtggttacgttgactactggggccagggaaccctggtcaccgtctcctcag

SEQ ID NO: 7236 - DNA, 358 bp, Homo sapiens
cagctgcagctgcaggagtcgggcccaggactggtgaagccttcggagaccctgtccctcacctgcactgtctctggtggctccatcagcagtagtagttactactggggctggatccgccagcccccagggaaggggctggagtggattgggagtatctattatagtgggagcacctactacaacccgtccctcaagagtcgagtcaccatatccgtagacacgtccaagaaccagttctccctgaagctgagctctgtgaccgccgcagacacggctgtgtattactgtgcgggcccacgggggttcagggagtttgactactggggccagggaaccctggtcaccgtctcctcag

SEQ ID NO: 7237 - DNA, 355 bp, Homo sapiens
cagatgcagctggtgcagtctggggctgaggtgaagaagactgggtcctcagtgaaggtttcctgcaaggcttccggatacaccttcacctaccgctacctgcactgggtgcgacaggcccccggacaagcgcttgagtggatgggatggatcacacctttcaatggtaacaccaactacgcacagaaattccaggacagagtcaccattaccagggacaggtctatgagcacagcctacatggagctgagcagcctgagatctgaggacacagccatgtattactgtgcaagatcggagtacgcttctggacttgactactggggccagggaaccctggtcaccgtctcctcag

SEQ ID NO: 7238 - DNA, 355 bp, Homo sapiens
caggtgcagctggtgcagtctggggctgaggtgaagaagcctgggtcctcggtgaaggtctcctgcaaggcttctggaggcaccttcagcagctatgctatcagctgggtgcgacaggcccctggacaagggcttgagtggatgggagggatcatccctatctttggtacagcaaactacgcacagaagttccagggcagagtcacgattaccgcggacgaatccacgagcacagcctacatggagctgagcagcctgagatctgaggacacggccgtgtattactgtgcgagaagggcagtggctggcccttttgtctactggggccagggaaccctggtcaccgtctcctcag

SEQ ID NO: 7239 - DNA, 355 bp, Homo sapiens
caggtccagctggtgcagtctggggctgaggtgaagaagcctgggtcctcggtgaaggtttcctgcaaggcttctggaggcaccttcaacatctctattatcaattgggtgcgacaggcccctggacaagggcttgagtggatgggaaggatcatccctatccttggcatagcgaactacgcacagaagttccacgacagagtcaccattaccgcggacaaatacacgagcacagcctatttggaggtgagcagcctcagatctgaggacacggccgtgtattattgtgcgacagggagcacaaactacaatgaaagtaattgggggcagggaaccctggtcaccgtctcgtcag

SEQ ID NO: 7240 - DNA, 355 bp, Homo sapiens
gaggtgcagctggtggagtctgggggaggcttggtccagcctggggggtccctgagactctcctgtgcagcctctggattcacctttagcagctatgccatggtctgggtccgccaggctccagggaaggggctggagtgggtctcagctattagtggtagtggtggtagcacatactacgcagactccgtgaagggccggttcaccatctccagagacaattccaagaacacgctgtatctgcaaatgaacagcctgagagccgaggacacggccgtatattactgtgcgaaaactatagaccaatttttctttgactactggggccagggaaccctggtcaccgtctcctcag

SEQ ID NO: 7241 - DNA, 355 bp, Homo sapiens
gaggtgcagctgttggagtctgggggaggcttggtacagcctggggggtccctgagactctcctgtgcagcctctggattcacctttagcagctatgccatgagctgggtccgccaggctccagggaaggggctggagtgggtctcagctattagtggtagtggtggtagcacatactacgcagactccgtgaagggccggttcaccatctccagagacaattccaagaacacgctgtatctgcaaatgaacagcctgagagccgaggacacggccgtatattactgtgcgaaagttaggggctaccgggcgattgactactggggccagggaaccctggtcaccgtctcctcag

SEQ ID NO: 7242 - DNA, 355 bp, Homo sapiens
caggtgcagctggtggagtctgggggaggcgtggtccagcctgggaggtccctgagactctcctgtgcagcctctggattcaccttcagtagctatgctatgcactgggtccgccaggctccaggcaaggggctggagtgggtggcagttatatcatatgatggaagtaataaatactacgcagactccgtgaagggccgattcaccatctccagagacaattccaagaacacgctgtatctgcaaatgaacagcctgagagctgaggacacggctgtgtattactgtgcgagagatagggagcagctcgcctttgactactggggccagggaaccctggtcaccgtctcctcag

SEQ ID NO: 7243 - DNA, 356 bp, Homo sapiens
cagctgcagctgcaggagtccggctcagggctggtgaagccttcacagaccctatccctcacctgcgctgtcactggtgactccgtcagcagtggtggttattcctggagctggctccggcagccaccagggaggggcctggaatggattgggtacatctatcaaagtggaaacgcctactacaacccgtccctcacgagtcgagtcaccatgtcagtagacaggtccaagaacgagttctccctgaagttgacctctgtgaccgtcgcggacacggccgtgtattactgtgccagaacctcagcccagttctggttcgactcctggggccagggaacactggtcaccgtctcctc

SEQ ID NO: 7244 - DNA, 358 bp, Homo sapiens
cagctgcagctgcaggagtccggctcaggactggtgaagccttcacagaccctgtccctcacctgcgctgtctctggtggctccatcagcagtggtggttattcctggagctggatccggcagccaccagggaagggcctggagtggattgggtacatctatcatagtgggagcacctactacaacccgtccctcaagagtcgagtcaccatatcagtagacaggtccaagaaccagttctccctgaagctgagctctgtgaccgccgcggacacggccgtgtattactgtgccagaggtgtgggagctgccgactttgactactggggccagggagccctggtcaccgtctcctcag

SEQ ID NO: 7245 - DNA, 355 bp, Homo sapiens
gaggtgcagctggtggagtctgggggaggcctggtcaagactggggggtccctgagactctcctgtgcagcctctggattcaccttcagtacctataacatgaactgggtccgccaggctccagggaaggggctggagtgggtctcagccattgggagtagtagtggttatatatactacgcagactcagtgaagggccgattcaccatctccagagacaacgccaagaactcactgtatctgcaaatgaatagcctgagagccgaggacacggctgtgtattactgtgcgagagagggggttggggagtaccttgactactggggccagggaaccctggtcaccgtctcctcag

SEQ ID NO: 7246 - DNA, 355 bp, Homo sapiens
gaagtgcagctggtggagtctgggggagtcgtggtacagcctggggggtccctgagactctcctgtgcagcctctggattcacctttgatgattataccatgcactgggtccgtcaagctccggggaagggtctggagtgggtctctcttattagttgggatggtggtagcacatactatgcagactctgtgaagggccgattcaccatctccagagacaacagcaaaaactccctgtatctgcaaatgaacagtctgagaactgaggacaccgccttgtattactgtgcaaaattagcggatgcagatgcttttgatatctggggccaagggacaatggtcaccgtctcttcag

SEQ ID NO: 7247 - DNA, 355 bp, Homo sapiens
caggtgcagctggtgcagtctggggctgaggtgaagaagcctggggcctcagtgaaggtctcctgcaaggcttctggatacaccttcaccggctactatatgcactgggtgcgacaggcccctggacaagggcttgagtggatgggacggatcaaccctaacagtggtggcacaaactatgcacagaagtttcagggcagggtcaccatgaccagggacacgtccatcagcacagcctacatggagctgagcaggctgagatctgacgacacggccgtgtattactgtactggcagtggctggtattatgcttttgatatctggggccaagggacaatggtcaccgtctcttcag

SEQ ID NO: 7248 - DNA, 361 bp, Homo sapiens
gaggtgcagctggtggagtctgggggaggcttggtaaagcctggggggtcccttagactctcctgtgcagcctctggtttcactttcagtaacgcctggatgaactgggtccgccaggctccagggaaggggctggagtgggtcggccgtattaaaagcaaaactgatggtgggacaacagactacgctgcacccgtgaaaggcagattcaccatctcaagagatgattcaaaaaacacgctgtatctgcaaatgaacagcctgaaaaccgaggacacagccgtgtattactgtaccaccgacggtgactacggacaatttgactactggggccagggaaccctggtcaccgtctcctcag

SEQ ID NO: 7249 - DNA, 355 bp, Homo sapiens
gaggtgcagctggtggagtctgggggaggcttggtacagcctggggggtccctgagactctcctgtgcagcctctggattcaccttcagtagctatagcatgaactgggtccgccaggctccagggaaggggctggagtgggtttcatacattagtagtagtagtagtaccatatactacgcagactctgtgaagggccgattcaccatctccagagacaatgccaagaactcactgtatctgcaaatgaacagcctgagagacgaggacacggctgtgtattactgtgcgagatgggtgcgttatgatgcttttgatatctggggccaagggacaatggtcaccgtctcttcag

SEQ ID NO: 7250 - DNA, 352 bp, Homo sapiens
gaggtgcagctggtggagtctgggggaggcttggtccagccgggggggtccctgagactctcctgtgcagcctcgggattaatcgtcagtagcaactacatgagctgggtccgccaggctccagggaaggggctggagtgggtctcagttatttatagcggtggtagcacattctacgcagactccgtgaagggccgattcaccatctccagagacaattccaagaacacgctgtatcttcaaatgaatagcctgagacctgaggacacggctgtgtatttctgtgcgagagacgcggtggttcggggagtttccacatggggccagggaaccctggtcaccgtctcctcag

SEQ ID NO: 7251 - DNA, 358 bp, Homo sapiens
cagctgcagctgcaggagtcgggcccaggactggtgaagccttcggagaccctgtccctcacctgcactgtctctggtggctccatcagcagtagtagttactactggggctggatccgccagcccccagggaaggggctggagtggattgggagtatctattatagtgggagcacctactacaacccgtccctcaagagtcgagtcaccatatcagtagacacgtccaagaaccagttctccctgaagctgagctctgtgaccgcagcggacacggccgtgtattactgtgcgagagttcatagtgcctggtacttcgatctctggggccgtggcaccctggtcactgtctcctcag

SEQ ID NO: 7252 - DNA, 354 bp, Homo sapiens
caggtgcagctgcaggagtcgggcccaggactggtgaagccttcggggaccctgtccctcacctgcgctgtctctggtggctccatcagcagtagtaactggtggagttgggtccgccagcccccagggaaggggctggagtggattggggaaatctatcatagtgggagcaccaactacaacccgtccctcaagagtcgagtcaccatatcagtagacaagtccaagaaccagttctccctgaagctgagctctgtgaccgccgcggacacggccgtgtattactgtgcgggtgggggtggatactactacatggacgtctggggcaaagggaccacggtcaccgtctcctca

SEQ ID NO: 7253 - DNA, 351 bp, Homo sapiens
gaggtgcagctggtggagtctgggggaggcttggtccagccgggggggtccctgagactctcctgtgcagcctctggaatcaccgtcagtcgcaactacatgagctgggtccgccaggctccagggaaggggctggagtgggtctcaattatttatagtggtggtagcacattctacgcagactccgtgaagggccgattcaccatctccagagacaattccaagaacaccctatatcttcaaatgaacagcctgagagctgaggacacggctatgtattactgtgcgagagatctcgtctactacggtatggacgtctggggccaagggaccacggtcaccgtctcctca

SEQ ID NO: 7254 - DNA, 351 bp, Homo sapiens
gaggtgcagctggtggagtctgggggaggcttggtccagcctggggggtccgtgagactctcctgtgcagcctctggactcaccgtcagcagcaactacatgacctgggtccgccaggctccagggaaggggctggagtgggtctcagttctttatagcggtggtagcacagactacgcagactccgtgaagggccgattcaccatctccagagacaattccaagaacacgctgtatcttcaaatgaacagcctgagagttgaggacacggctgtgtattactgtgcgagagatctggtagtagctggtatggacgtctggggccaagggaccacggtcaccgtctcctca

SEQ ID NO: 7255 - DNA, 351 bp, Homo sapiens
gaagtgcagctggtggagtctgggggaggcttggtccagcctggggggtccctgaggctctcctgtgtagcctctggaatcatcgtcagtagcaactacatgagctgggtccgccaggctccggggaaggggttggagtgggtctcacttatttatgccggtggaaccacatactacgcagactccgtgaagggccgattcaccatctccagagacaattccaagaacatgctgtatcttcaaatgaacagcctgagagctgaggacacggctgtgtattactgtgccagagatctacaggactacggtatggacgtctggggccaagggaccacggtcaccgtctcctca

SEQ ID NO: 7256 - DNA, 355 bp, Homo sapiens
caggtgcagctggtgcagtctggggctgaggtgaagaagcctggggcctcagtgaaggtctcctgcaaggcttctggatacaccttcaccagttatgatatcaactgggtgcgacaggccactggacaagggcttgagtggatgggatggatgaaccctaatagtggtaacacaggctatgcacagaagttccagggcagagtcaccatgaccaggaacacctccataagcacagcctacatggagctgagcagcctgagatctgaggacacggccgtatattactgtgcgagaggggaaccctggtggtacttcgatttctggggccgtggcaccctggtcactgtctccccag

SEQ ID NO: 7257 - DNA, 355 bp, Homo sapiens
caggtgcagctgcaggagtcgggcccaggactggtgaagccttcacagaccctgtccctcacctgcactgtctctggtggctccatcagcagtggtgattactactggagttggatccgccagcccccagggaagggcctggagtggattgggtacatctattacagtgggagcacctactacaacccgtccctcaagagtcgagttaccatatcagtagacacgtccaagaaccagttctccctgaagctgagctctgtgactgccgcagacacggccgtgtattactgtgccagggctactcgtgccctttttgactactggggccagggaaccctggtcaccgtctcctcag

SEQ ID NO: 7258 - DNA, 352 bp, Homo sapiens
gaggtgcagctggtggagtctgggggaggcttggtccagcctggggggtccctgagactctcctgtgcagcctctggattcacctttagtagctattggatgagctgggtccgccaggctccagggaaggggctggagtgggtggccaacataaagcaagatggaagtgagaaatactatgtggactctgtgaagggccgattcaccatctccagagacaacgccaagaactcactgtatctgcaaatgaacagcctgagagccgaggacacggctgtgtattactgtgcgagagatcgcccttggaatgaggactactggggccagggaaccctggtcaccgtctcctcag

SEQ ID NO: 7259 - DNA, 355 bp, Homo sapiens
caggtgcagctgcaggagtcgggcccaggactggtgaagccttcggggaccctgtccctcacctgcggtgtctctggtggctccatcagcagtactaactggtggagttgggtccgccagcccccagggaaggggctggagtggattggggaaatccatcatagtggaaacaccaactacaacccgtccctcaagagtcgagtcaccatatcagtagacaagtccaagaaccagttctccctgaagctgagctctgtgaccgccgcggacacggccgtgtattactgtgcgagaggatcaggctttggggactttgactactggggccagggaaccctggtcaccgtctcctcag

SEQ ID NO: 7260 - DNA, 349 bp, Homo sapiens
gaggtgcagttggtggagtctgggggaggcttggtccagcctggggggtccctgagactctcctgtgcagtctctgaattcatcgtcagtaacaactacatgacctgggtccgccaggctccagggaaggggctggagtgggtctcagttctttatagcggtggtagcacatactacgcagactccgtgaagggccgattcaccatctccagagacaattccaagaacacactgtatcttcaaatgaacagcctgagagttgaggacacggctatatattactgtgcgagagccgtggcttactactttgactactggggccagggaaccctggtcaccgtctcctcag

SEQ ID NO: 7261 - DNA, 350 bp, Homo sapiens
gaggtgcagctggtggagtctgggggaggcttggtccagcctggggggtccctgagactctcctgtgcagcttctggaatcaccgtcagtagcaactacatgagctgggtccgccaggctccagggaaggggctggaatgggtctcagttatgtatagcggtggtagcacattctacgcagactccgtgaagggccgattcaccatctccagagacaattccaagaatacgctatatcttcaaatgaacagcctgagacctaaggacacggctgtgtattactgtgcgagatcaatcggggaggacgcttttgatatctggggccaagggacaatggtcaccgtctcttc

SEQ ID NO: 7262 - DNA, 352 bp, Homo sapiens
gaggtgcagctggtggagtctgggggaggcttggtccagccgggggggtccctgagactgtcctgtgcagcctctggattcaccgtcagtagcaattacatgacctgggtccgccaggctccagggaaggggctggagtgggtctcagttatttatagcggtggtagcacatactacgcagactccgtgaagggccgattcaccatctccagagacaattccaagaacacgctgcatcttcaaatgaacagcctgagagctgaggacacggctgtgtattactgtgcgagcccggttcggcgggatgcttttgatgtctggggccaagggacaatggtcaccgtgtcttcag

SEQ ID NO: 7263 - DNA, 355 bp, Homo sapiens
cagatcaccttgaaggagtctggtcctacgctggtgaaacccacacagaccctcacgctgacctgcaccttctctgggttctcactcagcacttatggagtggctgtgggctggatccgtcagcccccaggagaggccctggagtggcttgcactcatttattgggatgatgataagcgctacagcccatctctgaagagcaggctcaccatcaccaaggacacctccaaaaaccaggtggtccttacaatgaccaacatggaccctgtggacacagccacatattactgtgcacacagacgcggctggtacgtggactactggggccagggaaccctggtcaccgtctcctcag

SEQ ID NO: 7264 - DNA, 352 bp, Homo sapiens
caggtgcagctggtggagtctgggggaggcgtggtccagcctgggaggtccctgagactctcctgtacagcctccggattcaccttcagtaattatgtcatgaactgggtccgccaggctccaggcaaggggctggagtgggtggcacttatatcatttgatggaagcactacacagtacgcagactccgtgaagggccgattcaccatctccagagacatgtccaagaacacgctttatctgcaaatgaacagcctgcgagctgaggacacggctatatattactgtgcgagaaacttgctggggacctctgactactggggccagggaaccctggtcaccgtctcctcag

SEQ ID NO: 7265 - DNA, 352 bp, Homo sapiens
caggtgcagctgcaggagtcgggcccaggactggtgaagccttcggagaccctgtccctcacctgcactgtctctggttactccatcagcagtggttactactggggctggatccggcagcccccagggaaggggctggagtggattgggagtatctatcatagtgggagcacctactacaacccgtccctcaagagtcgagtcaccatatcagtagacacgtccaagaaccagttctccctgaagctgagctctgtgaccgccgcagacacggccgtgtattactgtgcgggagcgattctgggctttggggactactggggccagggaaccctggtcaccgtctcctcag

SEQ ID NO: 7266 - DNA, 352 bp, Homo sapiens
gaggtgcagctggtggagtccgggggaggcttagttcagcctggggggtccctgagactctcctgtgcagcctctggattcaccttcagtagctactggatgcactgggtccgccaagctccagggaaggggctggtgtgggtctcacgtattaatagtgatgggagtagcacaagctacgcggactccgtgaagggccgattcaccatctccagagacaacgccaagaacacgctgtatctgcaaatgaacagtctgagagccgaggacacggctgtgtattactgtgcaagagatcttagcggagggggagactactggggccagggaaccctggtcaccgtctcctcag

SEQ ID NO: 7267 - DNA, 352 bp, Homo sapiens
gaggtgcagttggtggagtccgggggaggcttagttcagcctggggggtccctgagactctcctgtgcagcctctggattcaccttcagtagcttctggatgcactgggtccgccaagttccagggaaggggctggtgtgggtctcacgtattaatagtgatgggagtagcgcaatctacgcggactccgtgaagggccgattcaccatctccagagacaacgccaagagcacgctgtatctgcaaatgaacagtctgagagccgaggacacggctgtgtattactgtggaaggccaagcaccagtaaaggttactactggggccagggaaccctggtcaccgtctcctcag

SEQ ID NO: 7268 - DNA, 358 bp, Homo sapiens
gaggtgcagctggtggagtctgggggaggcttggtacagccagggcggtccctgagactctcctgtacagcttctggattcacctttggtgattatgctatgagctggttccgccaggctccagggaaggggctggagtgggtaggtttcattagaagcaaagcttatggtgggacaacagaatacgccgcgtctgtgaaaggcagattcaccatctcaagagatgattccaaaagcatcgcctatctgcaaatgaacagcctgaaaaccgaggacacagccgtgtattactgtactagagagtggtgggcttactttgactactggggccagggaaccctggtcaccgtctcctcag

SEQ ID NO: 7269 - DNA, 358 bp, Homo sapiens
gaggtgcagctggtggagtctgggggaggcttggtaaagccagggcggtccctgagactctcctgtacagcctctggattcacctttggtgattatgcaatgagctggttccgccaggctccagggaaggggctggagtgggtagctttcattagaagcaaggcttatggtgggacaatagaatacgccgcgtctgtgaaaggcagattcaccatctcaagggatgattccaaaagcatcgcctatctgcaaatgaacagcctgaaaaccgaggacgcagccgtttattactgtactagatcccaatatcattattctgactgctggggccagggaaccctggtcaccgtctcctcag

SEQ ID NO: 7270 - DNA, 349 bp, Homo sapiens
gaggtgcagctggtggagtctgggggaggcttggtaaagcctggggggtcccttagactctcctgtgcagcctctggtttcagtttcagaaatgtctggatgaactgggtccgccaggctccagggaaggggctggagtgggtcggccgcattagaacgaaagctgaaggtgcgacaactgtaaatgtcaaaggcagattcatcatctcaagggatgattcaagcaacactctatatctgcagctgaacaacttgcaaaccgaggacacagccctgtattactgtacttcacgattggtgactacaaatgaacactggggccagggaaccctggtcaccgtctcctcag

SEQ ID NO: 7271 - DNA, 352 bp, Homo sapiens
gaggtgcagctggtggagtctgggggagacttggtccagcctggggggtccctgagactctcctgcgcagcctctggattcagcttcaggacctatgctatgcactgggtccgccaggttccagggaagggactggaatatgtttcagccattagcagtaatggggatagaacatattatggaaactctgtgaagggcaggttcaccgtctccagagacaattccaggggcacgctgtttcttcaaatgggcagtctgagagctgaggacatggctgtgtattactgtgcgagctgggatggttcggggagttattactggggccagggaaccctggtcaccgtctcctcag

SEQ ID NO: 7272 - DNA, 355 bp, Homo sapiens
cagctgcagctgcaggagtcgggcccaggactggtgaagccttcggagaccctgtccctcacctgcactgtctctggtggctccatcagcagtagtaattactactggggctggatccgccagcccccagggaaggggctggagtggattgcgagtatctattatagtgggagcacctactacaacccgtccctcaagagtcgagtcaccatatctgtagacacgtccaagaaccagttctccctgaagctgagctctgtgaccgcagcggacacggccgtgtattactgtttcgggcggtatgagtgggagctagactgctggggccagggaaccctggtcaccgtctcctcag

SEQ ID NO: 7273 - DNA, 349 bp, Homo sapiens
gaggtgcaactggtggagtctggaggaggcttaatccagcctggggggtccctgagactctcctgtgcagcctctggggtcaccgtcagtagcaactacatgagctgggtccgccaggctccagggaaggggctggagtgggtctcagttatttatagcggtggtagtacgttctacgcagactccgtgaagggccgattcaccatctccagagacaattccaagaacacgctgtatcttcaaatgaacagcctgagagccgaggacacggccgtgtattactgtgcgagggccgtttatgatgcttttgatatctggggccaagggacaatggtcaccgtctcttcag

SEQ ID NO: 7274 - DNA, 349 bp, Homo sapiens
gaggtgcagctggtggagtctggaggaggcttggtccagcctggggggtccctgagactctcctgtgcagcctctggggtcaccgtcagtagcaactatatgaactgggtccgccagcctccagggaaggggctggagtgggtctcagttatctatagtggtggtagcacattctacgcagactccgtgaagggccgcttcaccatctccagacacaattccaagaacacgctgtatcttcaaatgaacagcctgagagttgaggacacggccgtgtattactgtgcgagaggaatccctgacgtctttgatatctggggccaagggacaatggtcaccgtctcttcag

SEQ ID NO: 7275 - DNA, 351 bp, Homo sapiens
gaggtgcagctggtggagtttggaggaggcttggtccagcctggggggtccctgagactctcctgtgcagcctctgggctcaccgtcagtagcaactacatgagctgggtccgccaggctccagggaaggggctggagtgggtctcagttctttttagcggtggtagcacagactacgcagactccgtgaagggccgattcaccatctccagacacaattccaagaacacgctgtatcttcaaatgaacagcctgagagctgaggacacggccgtgtattactgtgtgagagatctcgactactacggtatggacgtctggggccaagggaccacggtcaccgtctcctca

SEQ ID NO: 7276 - DNA, 349 bp, Homo sapiens
caggtgcagctgcaggagtcgggcccaggactggtgaagccttcggggaccctgtccctcacctgcgctgtctctggtggctccatcaccagtaataattggtggagttgggtccgccagcccccagggaaggggctggagtggattggggaaatctatcatagtggcaacaccaactacaacccgtccctcagtcgagtcaccatgtcaatagacaagtccaagaaccagttctccctgaaggtgagctctgtgaccgccgcggacacggccgtgtattactgtgcgaggggcaatttcaggtcttttgactactggggccagggaacccgggtcaccgtctcctcag

SEQ ID NO: 7277 - DNA, 355 bp, Homo sapiens
cagatcgccttgaaggagtctggtcctacgctggtgaaacccacacagaccctcacgctaacctgctccttctctgggttctcactcagtattagtggagagggtgtgggctggatccgtcagcccccaggaaaggccctggagtggcttgcactcatttattgggatgatgataagcgctacagcccatctctgaagagcaggctcaccatcaccaaggacacctccaaaaaccaggtggtccttacaatgaccaacatggacactgtggacacagccacatattactgtgcacacctcctcccttacggactcgacccctggggccagggaaccctggtcatcgtctcctcag

SEQ ID NO: 7278 - DNA, 349 bp, Homo sapiens
gaggtgcagctggtggagtctggaggaggcttggtccagcctggggggtccctgagactctcctgtgcagtctctgggttcaccgtcagtagcaactacatgacctgggtccgccaggctccagggaaggggctggagtgggtctcagttatttatagtggtggtagcacattctacgcagactccgtgaagggccgattcaccatctccagacacaattccaagaacacgctgtatcttcaaatgaacagcctgagagctgaggacacggccgtgtattactgtgcgagaggaccttaccctccgacaggggaatggggccagggcaccctggtcaccgtctcctcag

SEQ ID NO: 7279 - DNA, 349 bp, Homo sapiens
gaggtgcagctggtggagtctggaggaggcttgatccagcctggggggtccctgagactctcctgtgcagcctctgggttcaccgtcagtagcaactacatgagctgggtccgccaggctccagggaaggggctggagtgggtctcagttatttatagcggtggtagcacatactacgcagactccgtgaagggccgattcaccatctccagagacaattccaagaacacgctgtatcttcaaatgaacagcctgagagccgaggacacggccgtgtattactgtgcgagatcccagtggctggcaaatgactactggggccagggaaccctggtcaccgtctcctcag

SEQ ID NO: 7280 - DNA, 352 bp, Homo sapiens
gaggtgcagctggtgcagtctggagcagaggtgaaaaagcccggggagtctctgaagatctcctgtaagggttctggatacagctttaccagctactggatcggctgggtgcgccagatgcccgggaaaggcctggagtggatggggatcatctatcctggtgactctgataccagatacagcccgtccttccaaggccaggtcaccatctcagccgacaagtccatcagcaccgcctacctgcagtggagcagcctgaaggcctcggacaccgccatgtattactgtgcgagacggacgatatccacttttgatatctggggccaagggacaatggtcaccgtctcttcag

SEQ ID NO: 7281 - DNA, 352 bp, Homo sapiens
gaggtgcagctggtggagtctgggggaggcttggtacagcctggggggtccctgagactctcctgtgcagcctctggattcaccttcagtgactatagcatgaattgggtccgccagactccagggaaggggctggagtgggtttcatacattagtagtgacagtagttccatatactacccagactctgtgaagggccgattcaccatctccagagacaatgccaagaactcactgtatctgcaaatgaacagcctgagagacgaggacacggctgtttattactgtgcgagagggaatatccgactctttgactactggggccagggaaccctggtcaccgtctcctcag

SEQ ID NO: 7282 - DNA, 352 bp, Homo sapiens
gaggtgcagctggtggagtctgggggaggcttggtacagcctggggggtccctgagactctcctgtgcagcctctggattcaccttcagtagctatagcatgaactgggtccgccaggctccagggaaggggctggagtgggtttcatacattagtagtagtagtagtaccatatactacgcagactctgtgaagggccgattcaccatctccagagacaatgccaagaactcactgtatctgcaaatgaacagcctgagagacgaggacacggctgtgtattactgtgcgagacacgggagtggttatcccgactactggggccagggaaccctggtcaccgtctcctcag

SEQ ID NO: 7283 - DNA, 352 bp, Homo sapiens
gaggtgcagctggtggagtctgggggaggcttggtacagcctggggggtccctgagactctcctgtgcagcctctggattcaccttcagtagctatagcatgaactgggtccgccaggctccagggaaggggctggagtgggtttcatacattagtagtcggagtagtaccatatactacgcagactctgtgaagggccgattcaccatctccagagacaacgccaagaactcactgtttctgcaaatgaacagcctgagagccgaggacacggctgtgtattactgtgcgagagaatatagcagcagggctgactactggggccaggggaccctggtcaccgtctcctcag

SEQ ID NO: 7284 - DNA, 352 bp, Homo sapiens
gaggtgcagctggtggagtctgggggaggcctggtcaagccgggggggtccctgagactctcctgtgcagcctctggattcaccttcagtgactacagcatgaactgggtccgccgggctccagggaaggggctggagtgggtctcatccattagtcgtactagtacttacatatactacgcagactcagtgaagggccgattcaccatctccagagacaacgccaagaactcactgtatctgcaaatgaacagcctgagagccgaggacacggctgtgtattactgtgcgagggacgtatacgtttgggggagttcatggggccagggaaccctggtcaccgtctcctcag

SEQ ID NO: 7285 - DNA, 397 bp, Homo sapiens
caggtgcagctggtggagtctgggggaggcgtggtccagcctgggaggtccctgagactctcctgtgcagcctctggattcaccttcagtagctatgctatgcactgggtccgccaggctccaggcaaggggctggagtgggtggcagttatatcatatgatggaagcaataaatactacgcagactccgtgaagggccgattcaccatctccagagacaattccaagaacacgctgtatctgcaaatgaacagcctgagagctgaggacacggctgtgtattactgtgcgagagattgggctttggattattgtagtggtggtagctgctactcgggggcgggttctcgggcttttgatatctggggccaagggacaatggtcaccgtctcttcag

SEQ ID NO: 7286 - DNA, 387 bp, Homo sapiens
caggtgcagctgcaggagtcgggcccaggactggtgaagccttcggagaccctgtccctcacctgcactgtctctggtggctccatcagtagttactactggagctggatccggcagcccccagggaagggactggagtggattgggtatatctattacagtgggagcaccaactacaacccctccctcaagagtcgagtcaccatatcagtagacacgtccaagaaccagttctccctgaagctgagctctgtgaccgctgcggacacggccgtgtattactgtgcgagagatcggtggggctattactatggttcggggagttattctcggcctgactacggtatggacgtctggggccaagggaccacggtcaccgtctcctca

SEQ ID NO: 7287 - DNA, 349 bp, Homo sapiens
gaggtgcaaatggtggagtctgggggaggcttggtacagcctggggggtccctgagactctcttgtgcagcctctggattcaccttcagtatctacgacatgcactgggtccgccaaggtacaggaaaaggtctggaatgggtctcaactattggtacagctggtgacacatactatccaggctccgtgaagggccgattcaccatctccagagaaaatgccaagagctccttgtatcttcaaatgaacagcctgagagccggggacacggctgtgtattactgtgcaagaggactgctagacgcttttgatatctggggccaagggacaatggtcaccgtctcttcag

SEQ ID NO: 7288 - DNA, 391 bp, Homo sapiens
gaggtgcagctggtacagtctggagcagaggtgaaaaagcccggggagtctctgaggatctcctgtaagggttctggatacagttttaccagctactggatcacctgggtgcgccagatgcccgggaaaggcctggagtggatggggaggattgatcctaatgactcttataccaactacagcccgtccttccaaggccacgtcaccatctcagctgacaagtccatcaacactgcctacctgcagtggagcagcctgaaggcctcggacaccgccatgtattactgtgcgagaggggggttgggtggaaatagtgcctacgaatacttgttgctcgtcgggtcgtggttcgacccctggggccacggaaccctggtcaccgtctcctcag

SEQ ID NO: 7289 - DNA, 352 bp, Homo sapiens
caggtgcagctggtgcagtctggggctgaggtgaagaagcctgggtcctcggtgaaggtctcctgcaaggcttctggaggcaccttcagcagctatgctatcagctgggtgcgacaggcccctggacaagggcttgagtggatgggaaggatcatccctatccttggtatagcaaactacgcacagaagttccagggcagagtcacgattaccgcggacaaatccacgagcacagcctacatggagctgagcagcctgagatctgaggacacggccgtgtattactgtgcgagaggaacgatttttggagagggcccctggggccagggaaccctggtcaccgtctcctcag

SEQ ID NO: 7290 - DNA, 390 bp, Homo sapiens
gaagtgcagctggtgcagtctggagcagaggtgaaaaagcccggggagtctctgaggatctcctgtaagggttctggatacagctttatcatttactggatcagctgggtgcgccagatgcccgggaaaggcctggagtggatggggaggattgatcctagtgactcttataccagctacagcccgtccttccagggccacgtcaccatctcagctgacaagtccatcagcactgcctacctgcagtggagcaacctgaaggcctcggacaccgccatgtattactgtgcgaggcaccttccgtccttttacgatattttgactggttatttaaacgagcatcggggtatggacgtctggggccaagggaccacggtcaccgtctcctca

SEQ ID NO: 7291 - DNA, 390 bp, Homo sapiens
caggtccagctggtgcaatctggggctgaggtgaagaagcctgggtcctcggtgaaggtctcctgcaaggcttctggaggcaccttcagcagctatactatcagctgggtgcgacaggcccctggacaagggcttgagtggatgggaaggatcatccctatccttggtatagcaaactacgcacagaagttccagggcagagtcacgattaccgcggacaaatccacgagcacagcctacatggagctgagcagcctgagatctgaggacacggccgtgtattactgtgcgagaggagaatggtattacgatatttcctatcctcaccgagcattatcttactacggtatggacgtctggggccaagggaccacggtcaccgtctcctca

SEQ ID NO: 7292 - DNA, 390 bp, Homo sapiens
caggtgcagctggtgcagtctggggctgaggtgaagaagcctgggtcctcggtgaagttctcctgcacggcttctggaggcaccttcagcagccatgttatcagctgggtgcgacaggcccctggacaagggcttgagtggatgggagggatcatccctatcttcggtacaacaaacaacgcacagaagttccagggcagagtcacatttaccgcggacgaatccacgagcacagcctacatggaactgagcagcctgagatctgaggacacggccgtgtattactgtgcgggatggtcagaacggtccgtcatcggttcagggggttcctcctactactactactacatggacctctggggcaaagggaccacggtcaccgtctcctca

SEQ ID NO: 7293 - DNA, 390 bp, Homo sapiens
caggttcagctggtgcagtctggagctgaggtgaagaagcctggggcctcagtgaaggtctcctgcaaggcttctggttacacctttaccagctatggtatcagctgggtgcgacaggcccctggacaagggcttgagtggatgggatggatcagcgcttacaatggtaacacaaactatgcacagaagctccagggcagagtcaccatgaccacagacacatccacgagcacagcctacatggagctgaggagcctgagatctgacgacacggccgtgtattactgtgcgagattgttcaacgatttttggagtggttattatttgacccagtcttactactactacatggacgtctggggcaaagggaccacggtcaccgtctcctca

SEQ ID NO: 7294 - DNA, 390 bp, Homo sapiens
caggtgcagctggtggagtctgggggaggcgtggtccagcctgggaggtccctgagactctcctgtgcagcctctggattcaccttcagtagctatgctatgcactgggtccgccaggctccaggcaaggggctggagtgggtggcagttatatcatatgatggaagcaataaatactacgcagactccgtgaagggccgattcaccatctccagagacaattccaagaacacgctgtatctgcaaatgaacagcctgagagctgaggacacggctgtgtattactgtgcgagagatgcgctggactattactatggttcaggtaccaagtactactactactactacatggacgtctggggcaaagggaccacggtcaccgtctcctca

SEQ ID NO: 7295 - DNA, 390 bp, Homo sapiens
caggtgcagctggtgcaatctgggtctgagttgaagaggcctggggcctcagtgaaggtttcctgcaaggcttctggatacaccttcactacctatgctctgaattgggtgcgacaggcccctggacaagggcttgagtggctgggatggatcaacaccaacactgggaaccccacgtatgcccagggcttcacaggccggtttgtcttctccttggacacctctgtcagcacggcgtatctgcagatcagcagcctaaaggctgacgacacttccgtgtattactgtgcgagagcccaaggtagcagtgcctggagggcaggggcgtcctactactactactacgctatggacgtctggggccaagggaccacggtcaccgtctcctca

SEQ ID NO: 7296 - DNA, 390 bp, Homo sapiens
caggtgcagctggtgcagtctggggctgaggtgcagaagcctggggcctcagtgaaggtctactgcaaggcatctggatacaccttcagtaacttctatatgcactgggtgcgacaggcccctggacaaggacttgagtggatgggtatgatcaaccctagtggtggtagtgcaatctacgcacagaagtcccagggcagagtcaccatgaccagggacgcgtccacgaggacagtcaacttggaggtgagcagcctgagatatgaggacacggccgtgtattactgtgtgagagatgggtccgaccacacagcaattcgtgggaataaaatcaactactactcctacatgggcgtctggggcaaagggaccactgtcaccgtctcctca

SEQ ID NO: 7297 - DNA, 390 bp, Homo sapiens
caggtgcagctggtgcagtctggggctgaggtgaagaagcctggggcctcagtgaaggtttcctgcaaggcatctggatacaccttcaccagctactatatgcactgggtgcgacaggcccctggacaagggcttgagtggatgggaataatcaaccctagtggtggtagcacaagctacgcacagaagttccagggcagagtcaccatgaccagggacacgtccacgagcacagtctacatggagctgagcagcctgagatctgaggacacggccgtgtattactgtgcgagagatctttttaaaaggtattactatggttcagggagcctttactactactactacatggacgtctggggcaaagggaccacggtcaccgtctcctca

SEQ ID NO: 7298 - DNA, 381 bp, Homo sapiens
tggtggaatctgggggaggcgtggtccagcctggggagtccctgagactctcctgtgcagcctctggattcaccctcagcggctattctatgtactgggtccgccaggctccaggcgagggactggagtgggtgtcatctatatcatatgatggaactaagaaatactacgcagactccgtgaggggccgattcaccatctccagagacacctccaagaatacactggatctgcaaatgaacagcctgagatctgacgacacggctgtgtattactgtgtgcgaggcggactgttacgaatgactatgattcggggagttgttgtcaccgtcgagggctttgactactggggccagggaatccaggtcaccgtttcctcag

SEQ ID NO: 7299 - DNA, 391 bp, Homo sapiens
gaggtgcagctggtggagtctgggggaggcctggtcaagcctggggggtccctgagactctcctgtgcagcctctggattcaccttcaatagctataccatgaactgggtccgccaggctccagggaaggggctggagtgggtctcatccattcctagtactagcagttacatgtactacgcagactcagtgaaggggcgattcaccatctccagagacaaagccaagaactcactgtatctgcaaatgagcagcctgagagccgaggacacggctgtctattactgtgcgagagattcaacaccgtattactatggttcagggagttatttagctggccctgatgcttttgatatctggggccaagggacaatggtcaccgtttcttcag

SEQ ID NO: 7300 - DNA, 399 bp, Homo sapiens
cagctgcagctgcaggagtcgggcccaggactggtgaagccttcggagaccctgtccctcacctgcactgtctctggtggctccatcagcagtagtagttactactggggctggatccgccagcccccagggaaggggctggagtggattgggagtatctattatagtgggagcacctactacaacccgtccctcaagagtcgagtcaccatatcagtagacacgtccaagaaccagttctccctgaagctgagctctgtgaccgcagcggacacggccgtgtattactgtgcgagagattggggtgtgtattactatggttcggggagttattccagttactactactactacggtatggacgtctggggccaagggaccacggtcaccgtctcctca

SEQ ID NO: 7301 - DNA, 390 bp, Homo sapiens
caggtgcagctgcaggagtcgggcccaggactggtgaagccttcggggaccctgtccctcacctgcgctgtctctggtggctccatcagcagtagtgactggtggagttgggtccgccagcccccagggaaggggctggagtggattggggaaatctatcatagtgggagcaccaactacaacccgtccctcaagagtcgagtcaccatatcagtagacaagtccaagaaccagttctccctgaaactgagctctgtgaccgccgcggacacggccatgtattactgtgcgagagtccacccgtattacgatatccttgcgggggaaggaaactactactactactacatggacgtctggggcaaagggaccacggtcaccgtctcctca

SEQ ID NO: 7302 - DNA, 393 bp, Homo sapiens
gaggtgcagctggtggagtctgggggaggcctggtcaagcctggggggtccctgagactctcctgtgcagcctctggattcaccttcagtagctatagcatgaactgggtccgccaggctccagggaaggggctggagtgggtctcatccattagtagtagtagtagttacatatactacgcagactcagtgaagggccgattcaccatctccagagacaacgccaagaactcactgtatctgcaaatgaacagcctgagagccgaggacacggctgtgtattactgtgcgagcctctatggttcggggagttattataataaccccctccctcactactactactacggtatggacgtctggggccaagggaccacggtcaccgtctcctca

SEQ ID NO: 7303 - DNA, 392 bp, Homo sapiens
aggtgcagctgatggagtccgggggaggcttggtccagcctggggggtccctgagactctcctgtgcagcctctggattcaccttcagtagctatgctatgcactgggtccgccaggctccaggcaaggggctggagtgggtggcagttatatcgtatgatggaagtgataaatattacgcagactccgtgaagggccgattcaccatctccagagacaattccaagaacacactgtatctgcaaatgaacagcctgagagccgaggacacggccgtgtattactgtgcgagagtttccgtggtttacatttgggggagttatcgttgccctccttactactactactacatggacgtctggggcaaagggaccacggtcaccgtctcctca

SEQ ID NO: 7304 - DNA, 391 bp, Homo sapiens
caggtgcagctgcaggagtcgggcccaggactggtgaagccctcggagaccctgtccctcacctgcactgtctccggtggctccatcagcagtttttactgggcctggatccggcagccccccgggaagggactggaatggattggaagtatctattacagtgggagcaccaagtacaacccctccctcaagagtcgagtcaccatatcactagacacgtccaagaaccagttctccctgaagctgagctctgtgaccgctgcggacacggccgtgtattactgcgcgagagtgagatcggagtggctacgatttgcgaggagtgggactgaagtaacactgtaccactttgaccactggggccagggaaccctggtcaccgtctcctcag

SEQ ID NO: 7305 - DNA, 393 bp, Homo sapiens
caggtccagcttgtgcagtctggggctgaggtgaagaaacctggggcctcagtgaaggtttcctgcaaggcttctggatacaccttcactagctatgctatgcattgggtgcgccaggcccccggacaaaggcttgagtggatgggatggatcaacgctggcaatggtaacacaaaatattcacagaagttccagggcagagtcaccattacctgggacacatccgcgagcacagcctacatggagctgagcagcctgagatctgaagacgcggctgtgtatttctgcgcgagaggggaggtgggagcattacgatattttggccactcctattattaccagtactacgttatggacgtctggggccaagggaccacggtcaccgtctcctca

SEQ ID NO: 7306 - DNA, 394 bp, Homo sapiens
caggtgcagctggtggagtctgggggaggcgtggtccagcctgggaggtccctgagactctcctgtgcagcctctggattcaccttcagtagctatgctatgcactgggtccgccaggctccaggcaaggggctggagtgggtggcagttatatcatatgatggaagtaataaatactacgcagactccgtgaagggccgattcaccatctccagagacaattccaagaacacgctgtatctgcaaatgaacagcctgagagctgaggacacggctgtgtattactgtgcgagagatctaaccctcttttattgtagtagtaccagctgccaggggattttggacaactggttcgacccctggggccagggaaccctggtcaccgtctcctcag

SEQ ID NO: 7307 - DNA, 351 bp, Homo sapiens
caggtccagcttgtgcagtctggggctgaggtgaagaagcctggggcctcagtgaaggtttcctgcaaggcttctggatacaccttcactagctatgctatgcattgggtgcgccaggcccccggacaaaggcttgagtggatgggatggatcaacgctggcaatggtaacacaaaatattcacagaagttccagggcagagtcaccattaccagggacacatccgcgagcacagcctacatggagctgagcagcctgagatctgcagacacggctgtgtattactgtgcgagagaataaggtgaaaacctgactactggggccagggaaccctggtcaccgtctcctcag

SEQ ID NO: 7308 - DNA, 349 bp, Homo sapiens
caggtgcagctggtggagtctgggggagccgtggtccagcctggggggtccctgagactctcctgtgcagcctctggattcagcttcagtacctctgctatgcactgggtccgccaggctccagacagggggctggagtgggtggcagttatatcatatgatggagaaaataaatactacgcagactccgtgaagggccgattcaccatttccagagacacttccaagaacacgctgtatctgcaaatgaacaacctgagagctgaagacacggctgtgtattactgtgcgagaggacggactatgattacatttgaaggccagggaaccctggtcaccgtctcctcag

SEQ ID NO: 7309 - DNA, 375 bp, Homo sapiens
gaggtgcagctggtggagtctgggggaggcttggtccagcctggggggtccctgagactctcctgtgcagcctctggattcaccgtcagtagcaactacatgagctgggtccgccaggctccagggaaggggctggagtgggtctcagttatttatagcggtggtagcacatactacgcagactccgtgaagggccgattcaccatctccagagacaattccaagaacacgctgtatcttcaaatgaacagcctgagagctgaggacacggctgtgtattactgtgcgagagagtagatgaatattgtagtggtggtagctgctagttttggttcgacccctggggccagggaaccctggtcaccgtctcctcag

SEQ ID NO: 7310 - DNA, 393 bp, Homo sapiens
gaagtgcagctggtgcagtctggagcagaggtgaaaaagcccggggagtctctgaggatctcctgtaagggttctggatacagctttaccagctactggatcagctgggtgcgccagatgcccgggaaaggcctggagtggatggggaggattgatcctagtgactcttataccaactacagcccgtccttccaaggccacgtcaccatctcagctgacaagtccatcagcactgcctacctgcagtggagcagcctgaaggcctcggacaccgccatgtattactgtgcgagtgcttccatttttggttcggggagttattcccaaagtcatttctactactactacggtatggacgtctggggccaagggaccacggtcaccgtctcctca

SEQ ID NO: 7311 - DNA, 256 bp, Homo sapiens
ctccaagaaaggggctggactgggtctcaggtattagtggtagtggtcggaacacatactatgcagactccgtgaagggccggttcaccatctccagagacaattctaagaacacgctgtatctgcaaatgaacagcctgagagccgaggacacggccgtatattactgtgcgaaagagttgggtggatacagcctccaccaagggcccatcggtcttccccctggcaccctcctccaagagcacctctgggggca

SEQ ID NO: 7312 - DNA, 393 bp, Homo sapiens
caggtgcagctgcaggagtcgggcccaggactggtgaagccttcggggaccctgtccctcacctgcgctgtctctggtggctccatcagcagtagtaactggtggagttgggtccgccagcccccagggaaggggctggagtggattggggaaatctatcatagtgggagcaccaactacaacccgtccctcaagagtcgagtcaccatatcagtagacaagtccaagaaccagttctccctgaagctgagctctgtgaccgccgcggacacggccgtgtattactgtgcgaggcggggcggttgtagtggtggtagctgctactcgggtaagatttcctactactactacatggacgtctggggcaaagggaccacggtcaccgtctcctca

SEQ ID NO: 7313 - DNA, 383 bp, Homo sapiens
gaggtgcaactggtggagtctgggggaggcctggtcaagcctggggggtccctgagactctcctgtgcagcctctggattcaccttcagtagctatagcatgaactgggtccgccaggctccagggaaggggctggagtgggtctcatccattagtagtagtagtaattacatatactacgcagactcagtgaagggccgattcaccatctccagagacaacgccaagaactcactgtatctgcaaatgaacagcctgagagccgaggacacgtctgtgttttagtgtgcgagatgtggggggcattaagacgatattttgactggttatccgactacgatatggacgtctggggccaagggaccacggtcaccgtctcctca

SEQ ID NO: 7314 - DNA, 351 bp, Homo sapiens
aggtgcaggtgttggagtctgggggaggcttggtacagcggggggggtccctgagactctcctgtgcagcctctggattcacctttggcaaccatgccatgaactgggtccgccaggctccagggaaggggctgcagtgggtctcaagtgtttccgctggtggtactaccaaacactacgcagactccgtgaagggccgattcagcgtctccagagacaattccaagaacacggtgtatcttcaaatgagcagactgagagtcgaggacacggccctctattactgcgcaatcagtggggaacatactccggcttacgagggccagggaaccctggtcattgtctcctcag

SEQ ID NO: 7315 - DNA, 405 bp, Homo sapiens
gaggtgcagctggtggagtctgggggaggcttggtaaagcctggggggtcccttagactctcctgtgcagcctctggattcactttcagtaacgcctggatgagctgggtccgccaggctccagggaaggggctggagtgggttggccgtattaaaagcaaaactgatggtgggacaacagactacgctgcacccgtgaaaggcagattcaccatctcaagagatgattcaaaaaacacgctgtatctgcaaatgaacagcctgaaaaccgaggacacagccgtgtattactgtgtcctacccaccctcggatattgtagtagtaccagctgctatgccgaaagagggtcctactactacggtatggacgtctggggccaagggaccacggtcaccgtctcctca

SEQ ID NO: 7316 - DNA, 340 bp, Homo sapiens
gaggtgcagctggtggagtccgggggaggcttagttcagcctggggggtccctgagactctcctgtgcagcctctggattcaccttcagtactaagtggatgcactgggtccgccaggctccagggaaggggctggagtgggtctcacttattagtggtgttgagagcagggcaaactacgcggactccgtgaagggccgattcaccatcttcagagacaacgccaagaacacactgtttctgcaaatgaacagtctgagagccgaggacacggctgtatattactgtttggccgccgaattggccttgggcaaagggaccgcggtcaccgtctcctcag

SEQ ID NO: 7317 - DNA, 340 bp, Homo sapiens
gaggtgcagctggtggagtccgggggaggcttagttcagcctggggggtccctgagactctcctgtgcagcctctggattcaccttcagtactaaatggatgcactgggtccgccaagctccggggaaggggctggtgtgggtctcacttattagtagtgttggaagtactataaactacgcggactccgtgaagggccgattcaccgtctccagagacaacgccaagaacacactgtttctgcaaatgaacagtctgaaagccgacgacacggctgtgtattactgtttggcctccgaattggccttgggcaaagggaccgcggtcaccgtctcctcag

SEQ ID NO: 7318 - DNA, 129 bp, Homo sapiens
cagcagctacagggcagagtcacgattaccgcggacaaatccacgagcacagcctacatggagctgagcagcctgagatctgaggacacggccgtctattactgggaaccctggttactgtctcctcag

SEQ ID NO: 7319 - DNA, 374 bp, Homo sapiens
gaggtgcagctggtggagtctggggaaggcttggtccagcctggggggtccctgagactctcctgtgcagcctctggattcaccttcagtagctatgctatgcactgggtccgccaggctccagggaagggactggaatatgtttcacctattagtagttatgggggtagcacatattatgcagactctgtgaagggcagattcaccatctccagagacaattccaagaacacgctgtatcttcaaatgggcagcctgagagctgaggacatggctgtgtattactgtgcgagagtacaggttaaaacgggcagtggctggtcataactggttcgacccctggggccagggaaccctggtcaccgtctcctcag

SEQ ID NO: 7320 - DNA, 375 bp, Homo sapiens
caggtacacctgcagcagtcaggtccaggactggtgaagccctcgcagaccctctcactcacctgagccatctccggggacagtgtctctagcaacagtgctgcttggaactggatcaggcagtccccgtcgagaggccttgagtggctgggaaggacatactacaggtccaagtggtgtaatgattctgcactatctgtgaaaagtcgaataaccatcaacccagacacatccaagaagtagttttccctgcagctgaactctgtgactcccgaggacacggctgcgtattactgtgcaagagatcttaatcctctaattcggggagttattttgactactggggccagggaaccctggtcaccgtctcctcag

SEQ ID NO: 7321 - DNA, 351 bp, Homo sapiens
caggtgcagctggtgcagtctggggctgaggtgaagaagcctggggcctcagtgaaggtctcctgcaaggcttctggatgcaccttcaccggctactatattcactgggtgcgacaggcccctggacaagggcttgagtggatgggacggatcaaccctcacagtggaggcacaaactatccacagaagtttcagggcagggtcaccatgaccacagacacgtccatcagcacagtctatatggagttgagcaggctgagatctgacgacacggccgtgtactgctgtgcgagagggatattttgtactggtggttgccgcgggccagggaaccctggtcaccgtctcctc

SEQ ID NO: 7322 - DNA, 378 bp, Homo sapiens
caggtgtagctggtggagtctgggggaggcgtggtccagcctgggaggtccctgagactctcctgtgcagcctctggattcaccttcagtacctatgacatgcactgggtccgccgggctccaggcaaggggctggagtgggtggcagttatatcatatggtggaagtaataaatactatgcagactccgtgaagggccgattcaccatctccagagacaattccaagaacacgctgtctccgcaaatgaacagcctgagagctgaggacacggctgtgtattactgtgcgagctggggagatagtatattgtggtggtgattgctaccgtgtttttgttctactggggccagggaaccctggtcaccgtctcctcag

SEQ ID NO: 7323 - DNA, 401 bp, Homo sapiens
gaagtgcagctggtgcagtctggagcagaggtgaaaaagcccggggagtctctgaggatctcctgtaagggttttggatacaggtttattaggtactgtgtcaactgggtgcgccagatgcccgggaaaggcctggagtggatggggaggaatgatcctagtgagtcttataccaagtacagcccgtccttccaaggccacgtcaccatctcaactgacaagtccatcagcactgcctacctgcagtggaccagcctggaggcctcggacatcgccatgtattactgtgcgagaggcatggggccggaaattgtagttgttccagctgccatcgggcctaatgtttctaatgctacgtagtggacgtctggggccaaggggccacggtcaccgtctcctca

SEQ ID NO: 7324 - DNA, 352 bp, Homo sapiens
caggtgcagctggtgcagtgtggggctgaggtgaagaagcctgggtcctcggtgaaggtctcctgctaggcttctggaggcaccttctccagtgatgctattagttgggtgcgacaggcccctggacaagggcttgagtggatgggagggatcacccctatttttggtacagcaaactacgcacagaagttccagggcagagtcacgattaccgcggacgaatccacgagcacatcctacatggagctgagcagcctgacatctgaggacacggccgtgtattactgtgcgagaggccggtgaggcgactacgggatactgggccagggaaccctggtcaccgtctcctcag

SEQ ID NO: 7325 - DNA, 368 bp, Homo sapiens
caggtgcagctacagcagtggggcgcaggactgttgaagccttcggagaccctgtccctcacctgcgctgtctatggtgggtccttcagtggttactactggagctggatccgccagcccccagggaaggggctggagtggattggggaaatcaatcatagtggaaacaccaactacaacccgtccctcaagagtcgagtcaccatatcattagacacgtccaagaaccaattctccctgaagttgagctctgtgaccgccgcggacacggctgtgtattactgtgtaattgtagtggtggtagctgccaacaacattcattgtagaggggtcttggggccagggaaccctggtcaccgtctcctcag

SEQ ID NO: 7326 - DNA, 343 bp, Homo sapiens
gaggtgcagctggtggagtctgggggaggcttggtccagccgggggggtccctgagactctcctgtgcagcctctggaattaccgtcagtagtaactacatgagctgggtccgccaggctccagggaaggggctggagtgggtctcagttatttatagcggtggtagtacattctacgcagactccgtgaagggccgattcaccatctccagagacaattccaagaacacgctgtatcttcaaatgaacagcctgagagctgaggacacggctgtttattactgtgcgagaatcgtccgaaatgagtactggggccagggaaccctggtcaccgtctcctcag

SEQ ID NO: 7327 - DNA, 343 bp, Homo sapiens
gaggtgcaactggtggagtctggaggaggcttgatccagcctggggggtccctgagactctcctgtgcagcctctgggttaaccgtcagtagcaactacatgagctgggtccgccaggctccagggaagggactggagtgggtctcatctatttatagcggcggtagcacattctacgcagactccgtgaagggccgattcaccatctccagagacaattccaagaacacgctgtatctgcaaatgaacaaagtgagagccgaggacacggccgtgtattactgtgcgagagattatcgggacgtcctctggggccagggaaccctggtcaccgtctcctcag

SEQ ID NO: 7328 - DNA, 403 bp, Homo sapiens
caggtacagctgcagcagtcaggtccaggactggtgaagccctcgcagaccctctcactcacctgtgccatctccggggacagtgtctctagcaacagtgctgcttggaactggatcaggcagtccccatcgagaggccttgagtggctgggaaggacatactacaggtccaagtggtataatgattatgcagtatctgtgaaaagtcgaataaccatcaacccagacacatccaagaaccagttctccctgcagctgaactctgtgactcccgaggacacggctgtgtattactgtgcaagagtcacggtggggtggtggtagctgctacaccgaactacagtctgtacgggactactacatggacgtctggggcaaagggaccacggtcaccgtctcctca

SEQ ID NO: 7329 - DNA, 368 bp, Homo sapiens
caggtgcagctggtgcagtctggggctgaggtgaagaagcctggggcctcagtgaaggtttcctgcaaggcatctggatacaccttcaccgactactatattcactgggtgcgacaggcccctggacaagggcttgagtggatgggaataatcaaccctagtgctagtagcacaagctacgcacagaagttccagggcagagtcaccatgaccagggacacgtccacgagcacagtctacatggagctgagcagcctgagatctgaggacacggccgtgtattactgtgcgagaggcggttacggtgtcccgtcacgggggggggtatggacgtctggggccaagggaccacggtcaccgtctcctca

SEQ ID NO: 7330 - DNA, 387 bp, Homo sapiens
gaggtgcaactggtagagtctcggggagtcttgggacagcctggggggtccctgagactctcctgtgcagcctctggattcaccgtcagtagcaatgagatgagctgggtccgccaggctccagggaagggtctggagtgggtctcatccattagtggtggtagcacatactacgcagactccaggaagggcagagtcaccatctccagagacaattccaagaacacgctgcatcttcaaatgaacagcctgagaactgaggacacggctgtgtaatagtgtaaaagagaccccctttttggagtggttatcataatctttttagccggtcgcggtcgtactactttgactactggggccagggaaccctggtcaccgtctcctcag

SEQ ID NO: 7331 - DNA, 383 bp, Homo sapiens
caggtgcagctggtggagtctgggggaggcgtgggccagcctgggaggtccctgagactctcctgtgcagcctctggattcaccttcagtagatatggcatgcactgggtccgccaggctccaggcaaggggctggagtgggtggcagttatatcatatgatggaagtaaaaaatactatgcagactccgcgaagggccgattcagcatctccagagacaattccaagaacaccctgtatctgcaaatgaacagcctgagagccgaggacacggctgtgtattactgtgcgaaaggagggggggggatattgtagtggtggtaactgcttagtgtcctactttgactactggggccagggaaccctggtcaccgtctcctcag

SEQ ID NO: 7332 - DNA, 383 bp, Homo sapiens
gaggtgcagctggtggagtctgggggaggcttggtccagcctggggggtccctgagactctcctgtgcagcctgtggattcacctctagtagctattgaatgagctgggtccgccaggctccagggaaggggctggagtgggtggccaacataaagcaagatggaagtgagaaatactatgtggactctgtgaagggccgattcaccatctccagagacaacgccaagaagtcactgtatctgcaaatgaacagcctgagagtcgaggacacggccgtgtattagtgtgcgagagcgccgcctgtgtgtttttcgggtcttcactacgcccgtggctggtacatgtggctggggccagggaaccctggtcaccgtctcctcag

SEQ ID NO: 7333 - DNA, 399 bp, Homo sapiens
caggtgcagctacagcagtggggcgcaggactgttgaagccttcggagaccctgtccctcatatgcgctgtctatggtgggtccttcagtggttactactggagctgcatccgccagcccccagggaaggggctggagtggattggggaaatcaatcatagtggaaacaccaactacaacccgtccctcaatagtcgagtcaccatatcagtggacacgtccagaaaccagttctccctgaagctgagctctgtgaccgccgcggacacggctgtgtattactgtgcgagagaatcgaccgtgctccccccctctattgtagtggtgttacctactatggcccctgcgcttacttctctgactagtggggccagggaaccctggtcaccgtctcctcag

SEQ ID NO: 7334 - DNA, 402 bp, Homo sapiens
gaggtgcagctgttggagtctgggggaggcttggtacagcctggggggtccctgagactctcctgtgcagcctctggattcacctttagcagctatgccatgagctgggtccgccaggctccagggaaggggctggagtgggtctcagctattagtggtagtggtggtagcacatactacgcagactccgtgaagggccggttcaccatctccagagacaattccaagaacacgctgtatctgcaaatgaacagcctgagagccgaggacacggccgtatattactgtgcgaaagggaacccgtacgatttttggagtggttattataccggggacggcggtaactactactactactacatggacgtctggggcaaagggaccacggtcaccgtctcctca

SEQ ID NO: 7335 - DNA, 402 bp, Homo sapiens
gaggtgcagctgttggagtctgggggaggcttggtacagcctggggggtccctgagactctcctgtgcagcctctggattcaactttagcagctatgccatgagttgggtccgccaggctccagggaaggggctggagtgggtctcatctattagtggtagtggtggtagcacatactacccagactccgtgaagggccggttcaccatctccagagacaattccaagaacacgctgtctctgcaaatgaacagcctgagagccgaggacacggccgtatattactgtgcgaaagatgttcggcctcttgaagtagtaccaggtgctcatatatgggatgattacttctactactacggtatggacgtctggggccaagggacctcggccaccgtctcctca

SEQ ID NO: 7336 - DNA, 346 bp, Homo sapiens
caggtgcagctgcaggagtcgggcccaggactggtgaagccttcggggaccctgtccctcacctgcgctgtctctggtgactccatcagaagtatttactggtggaattgggtccgccagcccccagggaaggggctggagtggattggggaaatcaatcatagtgggagcaccaactacaacccgtccctcaagagtcgagtcaccatatcagtagacaatttcaagaaccaattttccctgaagctgagctctgtgaccgccgcggacacggccgtatattactgtgcgagcttgctattccgtgactactggggccagggaaccctggtcaccgtctcctcag

SEQ ID NO: 7337 - DNA, 328 bp, Homo sapiens
cagtctgccctgactcagcctgcctccgtgtctgggtctcctggacagtcgatcaccatctcctgcactggaaccagcagtgacgttggtggttataactatgtctcctggtaccaacaacacccaggcaaagcccccaaactcatgatttatgatgtcagttatcggccctcaggggtttctaatcgcttctctggctccaagtctggcaacacggcctccctgaccatctctgggctccaggctgaggacgaggctgattattactgcacctcatatacaagcagcagcacggtgttcggcggagggaccaagctgaccgtcctag

SEQ ID NO: 7338 - DNA, 339 bp, Homo sapiens
gatgttgtgatgactcagtctccactctccctgcccgtcacccttggacagccggcctccatctcctgcaggtctagtcaaagcctcgtatacagtgatggaaacacctacttgaattggtttcagcagaggccaggccaatttccaaggcgcctaatttataaggtttctaaccgggactctggggtcccagacagattcagcggcagtgggtcaggcactgatttcacactgaaaatcagcagggtggaggctgaggatgttggggtttattactgcatgcaaggtacacactggcttcgatcaccttcggccaagggacacgactggagattaaac

SEQ ID NO: 7339 - DNA, 328 bp, Homo sapiens; identical to SEQ ID NO: 7337

SEQ ID NO: 7340 - DNA, 328 bp, Homo sapiens; identical to SEQ ID NO: 7337

SEQ ID NO: 7341 - DNA, 328 bp, Homo sapiens; identical to SEQ ID NO: 7337

SEQ ID NO: 7342 - DNA, 328 bp, Homo sapiens; identical to SEQ ID NO: 7337

SEQ ID NO: 7343 - DNA, 328 bp, Homo sapiens; identical to SEQ ID NO: 7337

SEQ ID NO: 7344 - DNA, 328 bp, Homo sapiens; identical to SEQ ID NO: 7337

SEQ ID NO: 7345 - DNA, 328 bp, Homo sapiens; identical to SEQ ID NO: 7337

SEQ ID NO: 7346 - DNA, 328 bp, Homo sapiens; identical to SEQ ID NO: 7337

SEQ ID NO: 7347 - DNA, 328 bp, Homo sapiens; identical to SEQ ID NO: 7337

SEQ ID NO: 7348 - DNA, 328 bp, Homo sapiens; identical to SEQ ID NO: 7337

SEQ ID NO: 7349 - DNA, 328 bp, Homo sapiens; identical to SEQ ID NO: 7337

SEQ ID NO: 7350 - DNA, 328 bp, Homo sapiens; identical to SEQ ID NO: 7337

SEQ ID NO: 7351 - DNA, 328 bp, Homo sapiens; identical to SEQ ID NO: 7337

SEQ ID NO: 7352 - DNA, 328 bp, Homo sapiens; identical to SEQ ID NO: 7337

SEQ ID NO: 7353 - DNA, 328 bp, Homo sapiens; identical to SEQ ID NO: 7337

SEQ ID NO: 7354 - DNA, 328 bp, Homo sapiens; identical to SEQ ID NO: 7337

SEQ ID NO: 7355 - DNA, 339 bp, Homo sapiens; identical to SEQ ID NO: 7338

SEQ ID NO: 7356 - DNA, 319 bp, Homo sapiens
gacatccaggtgacccagtctccatcctccctgtctacatctgtaggagacagagtcaccatcacttgccgggcaactcagagcattaataactttttaaattggtatcagcagaaaccagggaaagcccctaagctcctgatctatgctgcatccaatttgcaaagtggggtcccatcaaggttcagtggcagtggatttgggacagacttcactctcaccatcagcagtctacaccctgaagattttgcaacttactactgtcaacagggtcacaatgccccattcactttcggccctgggaccaagctggatctca

SEQ ID NO: 7357 - DNA, 319 bp, Homo sapiens; identical to SEQ ID NO: 7356

SEQ ID NO: 7358 - DNA, 319 bp, Homo sapiens; identical to SEQ ID NO: 7356

SEQ ID NO: 7359 - DNA, 319 bp, Homo sapiens; identical to SEQ ID NO: 7356

SEQ ID NO: 7360 - DNA, 319 bp, Homo sapiens; identical to SEQ ID NO: 7356

SEQ ID NO: 7361 - DNA, 319 bp, Homo sapiens; identical to SEQ ID NO: 7356

SEQ ID NO: 7362 - DNA, 319 bp, Homo sapiens; identical to SEQ ID NO: 7356

SEQ ID NO: 7363 - DNA, 319 bp, Homo sapiens; identical to SEQ ID NO: 7356

SEQ ID NO: 7364 - DNA, 319 bp, Homo sapiens; identical to SEQ ID NO: 7356

SEQ ID NO: 7365 - DNA, 319 bp, Homo sapiens; identical to SEQ ID NO: 7356

SEQ ID NO: 7366 - DNA, 319 bp, Homo sapiens; identical to SEQ ID NO: 7356

SEQ ID NO: 7367 - DNA, 319 bp, Homo sapiens; identical to SEQ ID NO: 7356

SEQ ID NO: 7368 - DNA, 319 bp, Homo sapiens; identical to SEQ ID NO: 7356

SEQ ID NO: 7369 - DNA, 319 bp, Homo sapiens; identical to SEQ ID NO: 7356

SEQ ID NO: 7370 - DNA, 319 bp, Homo sapiens; identical to SEQ ID NO: 7356

SEQ ID NO: 7371 - DNA, 322 bp, Homo sapiens
gaaattgtgttgacgcagtctccaggcaccctgtctttgtctccaggggaaagagccaccctctcctgcagggccagtcagagtgttagcagtagttacttagcctggtatcagcagagacctggccaggctcccaggctcctcatctatggtgcatccagcagggccactggcatcccagacaggttcagtggcagtgggtctgggacagacttcactctcaccatcagcagactggagcctgaagattttgcagtgtattactgtcagcagtatggtagctcacccactttcggcggagggaccaaggtggagatcaaac

SEQ ID NO: 7372 - DNA, 322 bp, Homo sapiens; identical to SEQ ID NO: 7371

SEQ ID NO: 7373 - DNA, 322 bp, Homo sapiens; identical to SEQ ID NO: 7371

SEQ ID NO: 7374 - DNA, 322 bp, Homo sapiens; identical to SEQ ID NO: 7371

SEQ ID NO: 7375 - DNA, 322 bp, Homo sapiens; identical to SEQ ID NO: 7371

SEQ ID NO: 7376 - DNA, 322 bp, Homo sapiens; identical to SEQ ID NO: 7371

SEQ ID NO: 7377 - DNA, 322 bp, Homo sapiens; identical to SEQ ID NO: 7371

SEQ ID NO: 7378 - DNA, 322 bp, Homo sapiens; identical to SEQ ID NO: 7371

SEQ ID NO: 7379 - DNA, 322 bp, Homo sapiens; identical to SEQ ID NO: 7371

SEQ ID NO: 7380 - DNA, 322 bp, Homo sapiens; identical to SEQ ID NO: 7371

SEQ ID NO: 7381 - DNA, 322 bp, Homo sapiens; identical to SEQ ID NO: 7371

SEQ ID NO: 7382 - DNA, 322 bp, Homo sapiens; identical to SEQ ID NO: 7371

SEQ ID NO: 7383 - DNA, 322 bp, Homo sapiens; identical to SEQ ID NO: 3934

SEQ ID NO: 7384 - DNA, 322 bp, Homo sapiens; identical to SEQ ID NO: 3934

SEQ ID NO: 7385 - DNA, 322 bp, Homo sapiens; identical to SEQ ID NO: 3934

SEQ ID NO: 7386 - DNA, 322 bp, Homo sapiens; identical to SEQ ID NO: 3934

SEQ ID NO: 7387 - DNA, 322 bp, Homo sapiens; identical to SEQ ID NO: 3934

SEQ ID NO: 7388 - DNA, 322 bp, Homo sapiens; identical to SEQ ID NO: 3934

SEQ ID NO: 7389 - DNA, 322 bp, Homo sapiens; identical to SEQ ID NO: 3934

SEQ ID NO: 7390 - DNA, 322 bp, Homo sapiens; identical to SEQ ID NO: 3934

SEQ ID NO: 7391 - DNA, 322 bp, Homo sapiens; identical to SEQ ID NO: 3934

SEQ ID NO: 7392 - DNA, 322 bp, Homo sapiens; identical to SEQ ID NO: 3934

SEQ ID NO: 7393 - DNA, 322 bp, Homo sapiens; identical to SEQ ID NO: 3934

SEQ ID NO: 7394 - DNA, 322 bp, Homo sapiens; identical to SEQ ID NO: 3934

SEQ ID NO: 7395 - DNA, 322 bp, Homo sapiens
gacatccagatgacccagtctccatcctccctgtctgcatctgtaggagacagagtcaccatcacttgccgggcaagtcagggcattagaaatgctttaggctggtatcagcagaaaccagggaaagcccctaagcgcctgatctatgctgcatccagtttgcaaagtggggtcccatcaaggttcagcggcagtggatctgggacagaattcactctcacaatcaccagcctgcagcctgaagattttgcaacttattactgtctacagcatgatagttaccctcgaacttttggccaggggaccaagctggagatcaaac

SEQ ID NO: 7396 - DNA, 322 bp, Homo sapiens; identical to SEQ ID NO: 7395

SEQ ID NO: 7397 - DNA, 322 bp, Homo sapiens; identical to SEQ ID NO: 7395

SEQ ID NO: 7398 - DNA, 322 bp, Homo sapiens; identical to SEQ ID NO: 7395

SEQ ID NO: 7399 - DNA, 322 bp, Homo sapiens; identical to SEQ ID NO: 7395

SEQ ID NO: 7400 - DNA, 322 bp, Homo sapiens; identical to SEQ ID NO: 7395

SEQ ID NO: 7401 - DNA, 322 bp, Homo sapiens; identical to SEQ ID NO: 7395

SEQ ID NO: 7402 - DNA, 322 bp, Homo sapiens; identical to SEQ ID NO: 7395

SEQ ID NO: 7403 - DNA, 322 bp, Homo sapiens; identical to SEQ ID NO: 7395

SEQ ID NO: 7404 - DNA, 322 bp, Homo sapiens; identical to SEQ ID NO: 7395

SEQ ID NO: 7405 - DNA, 328 bp, Homo sapiens
cagtctgccctgactcagcctgcctccgtgtctgggtctcctgcacagtcgatcaccatctcctgcactggaaccagcagtgacgttggtggttataactatgtctcctggtaccaacaacacccaggcaaagcccccaaactcatgatttatgatgtcagtaatcggccctcaggggtttctaatcgcttctctggctccaagtctggcaacacggcctccctgaccatctctgggctccaggctgaggacgaggctgattattactgcagctcatatacaagcggcaacactctattcggcggagggaccaagctgaccgtcctag

SEQ ID NO: 7406 - DNA, 328 bp, Homo sapiens; identical to SEQ ID NO: 7405

SEQ ID NO: 7407 - DNA, 328 bp, Homo sapiens; identical to SEQ ID NO: 7405

SEQ ID NO: 7408 - DNA, 328 bp, Homo sapiens; identical to SEQ ID NO: 7405

SEQ ID NO: 7409 - DNA, 328 bp, Homo sapiens; identical to SEQ ID NO: 7405

SEQ ID NO: 7410 - DNA, 328 bp, Homo sapiens; identical to SEQ ID NO: 7405

SEQ ID NO: 7411 - DNA, 328 bp, Homo sapiens; identical to SEQ ID NO: 7405

SEQ ID NO: 7412 - DNA, 328 bp, Homo sapiens; identical to SEQ ID NO: 7405

SEQ ID NO: 7413 - DNA, 328 bp, Homo sapiens
cagtctgccctgactcagcctgcctccgtgtctgggtctcctggacagtcgatcaccatctcctgcactggaaccagcagtgacgttggtggttataactatgtctcctggtaccaacaacacccaggcaaagcccccaaactcatgatttatgatgtcagtaatcggccctcaggggtttctaatcgcttctctggctccaagtctggcaacacggcctccctgaccatctctgggctccaggctgaggacgaggctgattattactgcagctcatatacaagcggcaacactctattcggcggagggaccaagctgaccgtcctag

SEQ ID NO: 7414 - DNA, 328 bp, Homo sapiens; identical to SEQ ID NO: 7405

SEQ ID NO: 7415 - DNA, 325 bp, Homo sapiens
gaaattgtgttgacgcagtctccaggcaccctgtctttgtccccaggggaaagagccaccctctcctgcagggccagtcagagtgttagcagaaactacttagcctggtaccagcagaaacctggccaggctcccaggctcctcatctatggtgcatccagcagggccactggcatcccagacaggttcagtggcagtgggtctgggacagacttcacactcaccatcagcagactggagcctgaagattttgcagtgtattactgtcagcagtatggtagctcattgtacacttttggccaggggaccaagctggagatcaaac

SEQ ID NO: 7416 - DNA, 325 bp, Homo sapiens; identical to SEQ ID NO: 7415

SEQ ID NO: 7417 - DNA, 325 bp, Homo sapiens; identical to SEQ ID NO: 7415

SEQ ID NO: 7418 - DNA, 325 bp, Homo sapiens; identical to SEQ ID NO: 7415

SEQ ID NO: 7419 - DNA, 325 bp, Homo sapiens; identical to SEQ ID NO: 7415

SEQ ID NO: 7420 - DNA, 325 bp, Homo sapiens; identical to SEQ ID NO: 7415

SEQ ID NO: 7421 - DNA, 325 bp, Homo sapiens; identical to SEQ ID NO: 7415

SEQ ID NO: 7422 - DNA, 325 bp, Homo sapiens; identical to SEQ ID NO: 7415

SEQ ID NO: 7423 - DNA, 346 bp, Homo sapiens
cagcctgtgctgactcagccaacctccctctcagcatctcctggagcatcagccagattcacctgcaccttgcgcagtggcatcaatgttggtacctacaggatatactggtaccagcagaagccagggagtcttccccggtatctcctgaggtacaaatcagactcagataagcagcagggctctggagtccccagccgcttctctggatccaaagatgcttcaaccaatgcaggccttttactcatctctgggctccagtctgaagatgaggctgactattactgtgccatttggtacagcagcactgtggtattcggcggagggaccaagctgaccgtcctag

SEQ ID NO: 7424 - DNA, 346 bp, Homo sapiens; identical to SEQ ID NO: 7423

SEQ ID NO: 7425 - DNA, 346 bp, Homo sapiens; identical to SEQ ID NO: 7423

SEQ ID NO: 7426 - DNA, 346 bp, Homo sapiens; identical to SEQ ID NO: 7423

SEQ ID NO: 7427 - DNA, 346 bp, Homo sapiens; identical to SEQ ID NO: 7423

SEQ ID NO: 7428 - DNA, 346 bp, Homo sapiens; identical to SEQ ID NO: 7423

SEQ ID NO: 7429 - DNA, 351 bp, Homo sapiens
ctgcctgtgctgactcagcccccgtctgcatctgccttgctgggagcctcgatcaagctcacctgcaccctaagcagtgagcacagcacctacaccatcgattggtgtcaacagagaccagggaggtccccccagtatataatgaaggttaagagtgatggcagccacagcaagggggacgggatccccgatcgcttcatgggctccagttctggggctgaccgctacctcaccttctccaacctccagtctgacgatgagactgagtttcactgtggagagagccacacgattgatggccaagtcggttgagcgcggtgttcggcggagggaccaagctgaccgtcctag

SEQ ID NO: 7430 - DNA, 346 bp, Homo sapiens; identical to SEQ ID NO: 7423

SEQ ID NO: 7431 - DNA, 340 bp, Homo sapiens
gacatcgtgatgacccagtctccagactccctggctgtgtctctgggcgagagggccaccatcaattgcaagtccagccagagtgttttatacagctccaacaataagaactacttagcttggtaccagcaaaaaccaggacagcctcccaagctgctcatttactgggcatctacccgggaatccggggtccctgaccgattcagtggcagcgggtctgggacaaatttcactctcaccatcagcagcctgcaggctgaagatgtggcagtttactactgtcagcaatatcatggtactccgtacacttttggccaggggaccaagctggagatcaaac

SEQ ID NO: 7432 - DNA, 340 bp, Homo sapiens
gacatcgtgatgacccagtctccagactccctggctgtgtctctgggcgagagggccaccatcaattgcaagtccagccagagtgttctatacagctccaacaataagaaatacttagcttggtaccagcaaaaaccaggacagcctcccaagctgctcatttactgggcatctacccgggaatccggggtccctgaccgattcagtggcagcgggtctgggacaaatttcactctcaccatcagcagcctgcaggctgaagatgtggcagtttactactgtcagcaatatcatggtactccgtacacttttggccaggggaccaagctggagatcaaac

SEQ ID NO: 7433 - DNA, 340 bp, Homo sapiens; identical to SEQ ID NO: 7431

SEQ ID NO: 7434 - DNA, 340 bp, Homo sapiens; identical to SEQ ID NO: 7431

SEQ ID NO: 7435 - DNA, 340 bp, Homo sapiens
gacatcgtgatgacccagtctccagactccctggctgtgtctctgggcgagagggccaccatcaattgcaagtccagtcagagtgttttatacagctccaacaataagaactacttagcttggtaccagcaaaaaccaggacagcctcccaagttgctcatttactgggcatctacccgggaatccggggtccctgaccgattcagtggcagcgggtctgggacaaatttcactctcaccatcagcagcctgcaggctgaagatgtggcagtttactactgtcagcaatatcatggtactccgtacacttttggccaggggaccaagctggagatcaaac

SEQ ID NO: 7436 - DNA, 340 bp, Homo sapiens
gacatcgtgatgacccagtctccagactccctggctgtgtctctgggcgagagggccaccatcaattgcaagtccagccagagtgttttatacagctccaacaataagaactacttagcttggtaccagcaaaaaccaggacagcctcccaagctgctcatttactgggcatctacccgggaatccggggtccctgaccgattcagtggcagcgggtctgggacagatttcactctcaccatcagcagcctgcaggctgaagatgtggcagtttactactgtcagcaatatcatggtactccgtacacttttggccaggggaccaagctggagatcaaac

SEQ ID NO: 7437 - DNA, 340 bp, Homo sapiens; identical to SEQ ID NO: 7431

SEQ ID NO: 7438 - DNA, 325 bp, Homo sapiens
gaaattgtgttgacgcagtctccaggcaccctgtctttgtctccaggggaaagagccaccctctcctgcagggccagtcagagtgttaccagcagctacttagcctggtaccagcagaaacctggccaggctcccaggctcctcatctatggtgcatccagcagggccactggcatcccagacaggttcagtggcagtgggtctgggacagacttcactctcaccatcagcagactggagcctgaagattttgcagtgtattactgtcagcagtatggtagctcaccgtggacgttcggccaagggaccaaggtggaaatcaaac

SEQ ID NO: 7439 - DNA, 325 bp, Homo sapiens
gagattgtgttgacgcagtctccaggcaccctgtctttgtctccaggggaaagagccaccctctcctgcagggccagtcagagtgttagcagcagctacttagcctggtaccagcagaaacctggccaggctcccaggctcctcatctatggtgcatccagcagggccactggcatcccagacaggttcagtggcagtgggtctgggacagacttcactctcaccatcagcagactggagcctgaagattttgcagtgtattactgtcagcagtatggtagctcaccgtggacgttcggccaggggaccagggtggaaatcaaac

SEQ ID NO: 7440 - DNA, 325 bp, Homo sapiens
gaaattgtgttgacgcagtctccaggcaccctgtctttgtctccaggggaaagagtcaccctctcctgcagggccagtcagagtgttaccagcagctacttagcctggtaccagcagaaacctggccaggctcccaggctcctcatctatggtgcatccagcagggccactggcatcccagacaggttcagtggcagtgggtctgggacagacttcactctcaccatcagcagactggagcctgaagattttgcagtgtattactgtcagcagtatggtagctcaccgtggacgttcggccaagggaccaaggtggaaatcaaac

SEQ ID NO: 7441 - DNA, 325 bp, Homo sapiens; identical to SEQ ID NO: 7438

SEQ ID NO: 7442 - DNA, 325 bp, Homo sapiens
gaaattgtgttgacgcagtctccaggcaccctgtctttgtctccaggggaaagagccaccctctcctgcagggccagtcagagtgttaccagcaacttcttagcctggtaccagcagaaacctggccaggctcccaggctcctcatctatggtgcatccagcagggccactggcatcccagacaggttcagtggcagtgggtctgggacagacttcactctctccatcagcagactggagcctgaagattttgcaatgtattactgtcagcagtatggtagctcaccgtggacgttcggccaagggaccaaggtggaaatcaaac

SEQ ID NO: 7443 - DNA, 321 bp, Homo sapiens
gacatccagatgacccagtctccttccaccctgtctgcatctgtaggagacagagtcaccatcacttgccgggccagtcagagtattagtagttggttggcctggtatcagcagaaaccagggaaagcccctaaactcctgatctataaggcgtctagtttagaaagtggggtcccatcaaggttcagcggcagtggatctgggacaaaattcactctcaccatcagcagcctgcagcctgatgattttgcaacttattactgccaacagtataatagttatcgtacacttttggccaggggaccaagctggagatcaaac

SEQ ID NO: 7444 - DNA, 317 bp, Homo sapiens
gacatccagttgacccagtctccatcctccctgtctgcatctataggagacagagtcaccatcacttgccgggtgagtcaggtcttcgccagttctttaaattaatatcggcggaaactagggaaaattcctaaactcctaatctataatgcatcgaatttgcaatctggagtcccatctcggttcagtggcagtggatctgggacagatttagctctcactatcagcagcctgcagcctgaagatgttgcaatttattacggtcaacggacttgcaatgcccccgttcggccaagggaccaaggtggaaatcaaac

SEQ ID NO: 7445 - DNA, 337 bp, Homo sapiens
gatattgtgatgactcagtctccactctccctgcccgtcacccctggagagccggcctccatctcctgcaggtctagtcagagcctcctgcatggtaatggatacacctatttggattggtacctgcacaagccagggcagtctccacagctcctgatctatttgatttctagtcgggcctccggggtccctgacaggttcagtggcagtggatcaggcacagattttacactgaaaatcagcagagtggaggctgaggatgttggggtttattactgcatgcaaactctacaaactccgtacacttttggccaggggaccaagctggagatcaaac

SEQ ID NO: 7446 - DNA, 337 bp, Homo sapiens; identical to SEQ ID NO: 7445

SEQ ID NO: 7447 - DNA, 315 bp, Homo sapiens
gacatccagttgacccagtctccatcctccctgtctgcatctataggagacagagtcaccatcacttgccgggtgagtcaggtcatcagcagttctttaaattaatatcggcagaaactagggaaaattcctaaactcctgatctataatgcatcgaatttgcaatctggagtcccatctcggttcagtggcagtggatctgggacagatttagctctcactatcagcagcctgcagcctgaagatgttgcaatttattacggtcaacggacttgcaatgcccccgttcggccaagggaccaaggtggaaatcaa

SEQ ID NO: 7448 - DNA, 315 bp, Homo sapiens
gacgtccagttgacccagtctccatcctccctgtctgcatctgtaggagacagagtcaccatcacttgccgggagagtcagggcagtagcgtttacttaaagtggtatcggcagaaacctgggaaagttcctaagctcctggtctttggttcacccaatcagcaatctggagccccatcgtttcagtggcagtggatccgggacagatttcactctcactatcagcagcctgcagcctgaagattttgcaacttattgcggtcaatggactgacaatgtccccgttcggccaagggaccaaggtggaaatcaaac

SEQ ID NO: 7449 - DNA, 331 bp, Homo sapiens
cagtctgtgttgacgcagccgccctcagtgtctgcggccccaggacagaaggtcaccatctcctgctctggaagcagctccaacattgggaataattatgtatcctggtaccagcagctcccaggaacagcccccaaactcctcatttatgacaattatcagcgaccctcagggattcctgaccgattctctggctccaagtctggcacgtcagccaccctgggcatcaccggactccagactggggacgaggccgattattactgcggaacatgggatagcagcctgagtgctggcgtgttcggcggagggaccaagctgaccgtcctag

SEQ ID NO: 7450 - DNA, 331 bp, Homo sapiens; identical to SEQ ID NO: 7449

SEQ ID NO: 7451 - DNA, 331 bp, Homo sapiens; identical to SEQ ID NO: 7449

SEQ ID NO: 7452 - DNA, 331 bp, Homo sapiens; identical to SEQ ID NO: 7449

SEQ ID NO: 7453 - DNA, 331 bp, Homo sapiens; identical to SEQ ID NO: 7449

SEQ ID NO: 7454 - DNA, 317 bp, Homo sapiens
gccatccggatgacccagtctccatcctcattctctgcatctacaggggacagagtcaccatcacttgtcgggcgagtcagggtattagcagttatttagcctggtatcagcaaaaaccagggaaagcccctaagctcctgatctatgctgcatccagtttgcaaagtgaggtcccatcaaggttcagcggcagtggatctgggacagatttcactctcaccatcagctgcctgcagtctgaagattttgcaacttattactgtcaacagtattacagttccccgacgttcggccaagggaccaaggtggaaatcaa

SEQ ID NO: 7455 - DNA, 317 bp, Homo sapiens; identical to SEQ ID NO: 7454

SEQ ID NO: 7456 - DNA, 317 bp, Homo sapiens; identical to SEQ ID NO: 7454

SEQ ID NO: 7457 - DNA, 317 bp, Homo sapiens
gccatccggatgacccagtctccatcctcattctctgcatctacaggagacagagtcaccatcacttgtcgggcgagtcagggtattagcagttatttagcctggtatcagcaaaaaccagggaaagcccctaagctcctgatctatgctgcatccactttgcaaagtggggtcccatcaaggttcagcggcagtggatctgggacagatttcactctcaccatcagctgcctgcagtctgaggattttgcaacttattactgtcaacagtattataattccccgacgttcggccaagggaccaaggtggaaatcaa

SEQ ID NO: 7458 - DNA, 317 bp, Homo sapiens
gccatccggatgacccagtctccatcctcattctctgcatctacaggagacagagtcaccatcacttgtcgggcgagtcagggtattagcagttatttagcctggtatcagcaaaaaccagggaaagcccctaagctcctgatctatgctgcatccactttgcaaagtgaggtcccatcaaggttcagcggcagtggatctgggacagatttcactctcaccatcagctgcctgcagtctgaggattttgcaacttattactgtcaacagtattacagttccccgacgttcggccaagggaccaaggtggaaatcaa

SEQ ID NO: 7459 - DNA, 331 bp, Homo sapiens
cagtctgtgttgacgcagccgccctcagtgtctgcggccccaggacagaaggtcaccatctcctgttctggaggcagctccaacattgggggtaattatgtttcctggtaccagcagctcccaggaacagcccccaaactcgtcgtttatgacaataataagcgaccctcagggattcctgaccgattctctggctccaagtctggcacgtcagccaccctgggcatcaccggactccagactggggacgaggccgattattactgcggaacatgggatagcagcctgagtgctgctgtattcggcggagggaccaagctgaccgtcctag

SEQ ID NO: 7460 - DNA, 331 bp, Homo sapiens; identical to SEQ ID NO: 7459

SEQ ID NO: 7461 - DNA, 331 bp, Homo sapiens; identical to SEQ ID NO: 7459

SEQ ID NO: 7462 - DNA, 331 bp, Homo sapiens; identical to SEQ ID NO: 7459

SEQ ID NO: 7463 - DNA, 331 bp, Homo sapiens; identical to SEQ ID NO: 7459

SEQ ID NO: 7464 - DNA, 319 bp, Homo sapiens
tcctatgagctgactcagccaccctcagtgtccgtgtccccaggacagacagccagcatcacctgctctggagataaattgggggataaatatgcttcctggtatcagcagaagccaggccagtcccctgtgctggtcatctatcaagataccaagcggccctcagggatccctgagcgattctctggctccaactctgggaacacagccactctgaccatcagcgggacccaggctatggatgaggctgactattactgtcaggcgtgggacagcagcacttatgtcttcggaactgggaccaaggtcaccgtcctag

SEQ ID NO: 7465 - DNA, 319 bp, Homo sapiens
gacatccagatgacccagtctccttccaccctgtctgcatctgtaggagacagagtcaccatcacttgccgggccagtcagagtattagtagctggttggcctggtatcagcagaaaccagggaaagcccctaagctcctgatctatgaggcgtctagtttagaaagtggggtcccatcaaggttcagcggcagtggatctgggacagaattcactctcaccatcagcagcctgcagcctgatgattttgcaacttattactgccaaaagtataatagttattggacgttcggccaagggaccaaggtggaaatcaaac

SEQ ID NO: 7466 - DNA, 319 bp, Homo sapiens; identical to SEQ ID NO: 7464

SEQ ID NO: 7467 - DNA, 325 bp, Homo sapiens
gaagtagtgatgacgcagtctccagccaccctgtctgtgtctccaggggaaagagccaccctctcctgccgggccagtcagagtcttaacagcgacttagcctggtaccagcagaaacctggccaggctcccaggctcctcatctatggtgcatccaacagggccactggtatcccagccaggttcagtggcagtgggtctgggacagagttcactctcaccatcagcagcctgcagtctgaagattttgcagtttattactgtcagcagtatcataactggcctccgatcaccttcggccaagggacacgactggagattaaac

SEQ ID NO: 7468 - DNA, 319 bp, Homo sapiens
tcctatgagctgactcagccaccctcagtgtccgtgtccccaggacagacagccagcatcacctgctctggagataaattgggggataaatatgcttcctggtatcagcagaagccaggccagtcccctgtgctggtcatctatcaagataccaagcggccctcagggatccctgagcgattctctggctccaactctgggaacacagccactctgaccatcagcggtacccaggctatggatgaggctgactattactgtcaggcgtggcacagcagcacttatgccttcggaactgggaccaaggtcaccgtcctag

SEQ ID NO: 7469 - DNA, 331 bp, Homo sapiens
cagtctgccctgactcagcctgcctccgtgtctgggtctcctggacagtcgatcaccatctcctgcactggaaccagcagtgacgttggtggttttgactatgtctcctggtaccagcaacacccaggcaaagcccccaaactcatgatttatgatgtcagtaaacggccctcaggggtttctaatcgcttctctggctccaagtctggcaacacggcctccctgaccatctctgggctccaggctgaggacgaggctgattattactgcagctcatatacaaccagcagcacttgggtgttcggcggagggaccaaactgaccgtcctag

SEQ ID NO: 7470 - DNA, 331 bp, Homo sapiens
cagtctgccctgactcagcctgcctccgtgtctgggtctcctggacagtcgatcaccatctcctgcactggaaccagcagtgacgttggtggttttaactatgtctcctggtaccaacaacacccaggcaaagcccccaaactcatgatttatgatgtcagtaaacggccctcaggggtttctaatcgcttctctggctccaagtctggcaacacggcctccctgaccatctctgggctccaggctgaggacgaggctgattattactgcagctcatatacaaccagcagcacttgggtgttcggcggagggaccaagctgaccgtcctag

SEQ ID NO: 7471 - DNA, 331 bp, Homo sapiens
cagtctgccctgactcagcctgcctccgtgtctgggtctcctggacagtcgatcaccatctcctgcactggaaccagcagtgacgttggtggttttgactatgtctcctggtaccagcaacacccaggcaaagcccccaaactcatgatttatgatgtcagtaaacggccctcaggggtttctaatcgcttctctggctccaagtctggcaacacggcctccctgaccatctctgggctccaggctgaggacgaggctgattattactgcagctcatatacaaccagcagcacttgggtgttcggcggagggaccaagctgaccgtcctag

SEQ ID NO: 7472 - DNA, 331 bp, Homo sapiens; identical to SEQ ID NO: 7469

SEQ ID NO: 7473 - DNA, 322 bp, Homo sapiens
gaaattgtgttgacacagtctccagccaccctgtctttgtctccaggggaaagagccaccctctcctgcagggccagtcagagtgttaatagctacttagcctggtaccagcagaaacctggccaggctcccaggctcctcatctatgatgcatccaacagggccactggcatcccagccaggttcagtggcagggggtttgggacagacttcactctcaccatcagcagcctagagcctgaagattttgcagtttattactgtcaccaccgtagcaactggcctctcactttcggcggagggaccaaggtggaaatcaaac

SEQ ID NO: 7474 - DNA, 322 bp, Homo sapiens
gaaattgtgttgacacagtctccagccaccctgtctttgtctccaggggaaagagccaccctctcctgcagggccagtcagagtgttaatagctacttagcctggtaccaacagaaacctggccaggctcccaggctcctcatctatgatgcatccaacagggccactggcatcccagccaggttcagtggcagggggtttgggacagacttcactctcaccatcagcagcctagagcctgaagattttgcagtttattactgtcaccaccgtagcaactggcctctcactttcggcggagggaccaaggtggaaatcaaac

SEQ ID NO: 7475 - DNA, 322 bp, Homo sapiens; identical to SEQ ID NO: 7474

SEQ ID NO: 7476 - DNA, 322 bp, Homo sapiens; identical to SEQ ID NO: 7474

SEQ ID NO: 7477 - DNA, 325 bp, Homo sapiens
gaaatggtgttgacgcagtctccaggcaccctgtctttgtctccgggggaaagagccaccctctcctgcagggccagtcagagtgttagcagcacctacttagcctggtaccagcagaaacctggccaggctcccaggctcctcatctatggtgcatccagcagggccactggcatcccagacaggttcagtggcagtgggtctgggacagacttcactctcaccatcagcagactggagcctgaagattttgcagtgtattactgtcagcagtatgatagctcacctttcactttcggcccagggaccatagtggatatcaaac

SEQ ID NO: 7478 - DNA, 325 bp, Homo sapiens; identical to SEQ ID NO: 7477

SEQ ID NO: 7479 - DNA, 325 bp, Homo sapiens; identical to SEQ ID NO: 7477

SEQ ID NO: 7480 - DNA, 325 bp, Homo sapiens; identical to SEQ ID NO: 7477

SEQ ID NO: 7481 - DNA, 320 bp, Homo sapiens
gacatccagttgacccagtctccatccttcctgtctgcatctgtaggagacagagtcaccatcacttgccgggccagtcagggcattagcaattatttagcctggtatcagcaaaaaccagggaaagcccctaacctcctgatctatgctgcatccactttgcaaactggggtcccatcaaggttcagcggcagtggatctgggacagaattcactctcacaatcagcagcctgcagcctgaagattttgcaacttattactgtcaacagtccaatagttaccctctcactttcggcggagggaccaaggtggagatcaa

SEQ ID NO: 7482 - DNA, 320 bp, Homo sapiens; identical to SEQ ID NO: 7481

SEQ ID NO: 7483 - DNA, 320 bp, Homo sapiens; identical to SEQ ID NO: 7481

SEQ ID NO: 7484 - DNA, 320 bp, Homo sapiens; identical to SEQ ID NO: 7481

SEQ ID NO: 7485 - DNA, 322 bp, Homo sapiens
gacatccagatgacccagtctccttccaccctgtctgcatctgtaggagacagagtcaccatcacttgccgggccagtcagagtattagtagctggttggcctggtatcagcagaaaccagggaaagcccctaagttcctgatctataaggcgtctagtttagaaagtggggtcccatcaaggttcagcggcagtggatctgggacagaattcactctcaccatcagcagcctgcagcctgatgattttgcaacttattactgccaacagtataatagttacccattcactttcggccctgggaccaaagtggatatcaaac

SEQ ID NO: 7486 - DNA, 322 bp, Homo sapiens; identical to SEQ ID NO: 7485

SEQ ID NO: 7487 - DNA, 322 bp, Homo sapiens; identical to SEQ ID NO: 7485

SEQ ID NO: 7488 - DNA, 322 bp, Homo sapiens; identical to SEQ ID NO: 7485

SEQ ID NO: 7489 - DNA, 328 bp, Homo sapiens
gaaatagtgatgacgcagtctccagccaccctgtctgtgtctccaggggaaagagccaccctctcctgcagggccagtcagagtgttagcagcaacttagcctggtaccagcagaaacctggccagactcccaggctcctcatctttggtgcatccaccagggccactgggatcccagccaggttcagtggcagtgggtctgggacagagttcactctcaccatcagcagcctgcagtctgaagatttcgcagtttattactgtcagcagtatgataactggcctcgaacgatcaccttcggccaagggacacgactggagattaaac

SEQ ID NO: 7490 - DNA, 328 bp, Homo sapiens
gaaatagtgatgacgcagtctccagccaccctgtctgtgtctccaggggaaagagccaccctctcctgcagggccagtcagagtgttagcagcaacttagcctggtaccagcagaaacctggccagactcccaggctcctcatctttggtgcatccaccagggccactgggatcccagccaggttcagtggcagtgggtctgggacagagttcactctcaccatcagcagcctgcagtctgaagattttgcagtttattactgtcagcagtatgataactggcctcgaacgatcaccttcggccaagggacacgactggagattaaac

SEQ ID NO: 7491 - DNA, 328 bp, Homo sapiens; identical to SEQ ID NO: 7490

SEQ ID NO: 7492 - DNA, 328 bp, Homo sapiens
gaaatagtgatgacgcagtctccagccaccctgtctgtgtctccaggggaaagagccaccctctcctgcagggccagtcagagtgttagcagcaacttagcctggtaccagcagaaacctggccagactcccaggctcctcatctttggtgcatccaccagggccactgggatcccagccaggttcagtggcagtgggtctgggacagagttcactctcaccatctacagcctgcagtctgaagattttgcagtttattactgtcagcagtatgataactggcctcgaacgatcaccttcggccaagggacacgactggagattaaac

SEQ ID NO: 7493 - DNA, 325 bp, Homo sapiens
gaaatagtgatgacgcagtctccagccaccctgtctgtgtctccaggggaaagagccaccctctcctgcagggccagtcagactgttaccagcaacttagcctggtaccagcagaagcctggccaggctcccaggctcctcatctatggtgcatccaccagggccactggtgtcccagccaggttcagtggcagtgggtctgagacagagttcactctcaccatcagcagcctgcagtctgaagattttgcagtttattactgtcagcagtataataactggcgcccgcacactttcggcggagggaccaaggtggagatcaaac

SEQ ID NO: 7494 - DNA, 325 bp, Homo sapiens
gaaatagtgatgacgcagtctccagccaccctgtctgtgtctccaggggaaagagccaccctctcctgcagggccagtcagagtgttagcagcaacttagcctggtaccagcagaaacctggccaggctcccaggctcctcatctatggtgcatccaccagggccactggtatcccagccaggttcagtggcagtgagtctgggacagagttcactctcaccatcagcagcctgcagtctgaagattttgcagtttattactgtcagcagtataataactggcgcccgcacactttcggcggagggaccaaggtggagatcaaac

SEQ ID NO: 7495 - DNA, 325 bp, Homo sapiens
gaaatagtgatgacgcagtctccagccaccctgtctgtgtctccaggggaaagagccaccctctcctgcagggccagtctgagtgttagcagcaacttagcctggtaccagcagaaacctggccaggctcccaggctcctcatctttggtgcgtccaccagggccactggtatcccagccaggttcagtggcagtgggtctgagacagagttcactctcaccatcagcagcctgcagtctgaagattttgcagtttattactgtcagcagtataataactggcgcccgcacactttcggcggagggaccaaggtggagatcaaac

SEQ ID NO: 7496 - DNA, 331 bp, Homo sapiens
cagtctgtgttgacgcagccgccctcagtgtctgcggccccaggacagaaggtcaccatctcctgctctggaagcagctccaacattgggaataattatgtatcctggtaccagcaactcccaggaacagcccccaaactcctcatttatgacaataataagcgaccctcagggattcctgaccgattctctggctccaagtctggcacgtcagccaacctgggcatcaccggactccagactggggacgaggccgattattactgcggaacatgggatagcagcctgagtggtggggtgttcggcggagggaccaagctgaccgtcctag

SEQ ID NO: 7497 - DNA, 331 bp, Homo sapiens
cagtctgtgttgacgcagccgccctcagtgtctgcggccccaggacagaaggtcaccatctcctgctctggaagcagctccaacattggaaataattatgtatcctggtaccagcaactcccaggagcagcccccaaactcctcatttatgacaataataagcgaccctcagggattcctgaccgattctctggctccaagtctggcacgtcagccaacctgggcatcaccggactccagactggggacgaggccgattattactgcggaacatgggatagcagcctgagtggtggggtgttcggcggagggaccaagctgaccgtcctag

SEQ ID NO: 7498 - DNA, 331 bp, Homo sapiens; identical to SEQ ID NO: 7497

SEQ ID NO: 7499 - DNA, 318 bp, Homo sapiens
catccaggtgacccagtctccatcctccctgtctgcatctgtaggagacagagtcaccatcacttgccaggcgagtcgggacattagcaactatttaaattggtatcagcaaaaaccagggaaagcccctaagctcctgatctacgatgcatccaatttggaaacaggggtcccatcaagattcagtggaagtggatctgggacagactttactttcaccatcagcagcctgcagcctgaagatattgcaacatattactgtcaacagtatgataatctcctcctcagtttcggcggagggaccaaggtggagatcaa

SEQ ID NO: 7500 - DNA, 335 bp, Homo sapiens
gatattgtgatgactcagtctccactctccctgcccgtcacccctggagagccggcctccatctcctgcaggtctagtcagagcctcctgcatagtgatggatacaactatttggattggtacctgcagaagccagggcagtctccacagctcctgatctacttgggttctaatcgggcctccggggtccctgacaggttcagtggcagtggagcaggcacagattttacactgaaaatcagtagagtggaggctgaggatgttggggtttattactgcatgcaagctctacaaacggtacacttttggccaggggaccaagctggagatcaaac

SEQ ID NO: 7501 - DNA, 318 bp, Homo sapiens
catccaggtgacccagtctccatcctccctgtctgcatctgtaggagacagggtcaccatcacttgccaggcgagtcgggacattggcaactatttaaattggtatcagcagaaaccagggaaagcccctaagctcctgatctacgatgcagctaatttggaaacaggggtcccatcaagattcagtggaagtggatctgggacagactttactttcaccatcagcagcctgcagcctgaagatattgcaacatattactgtcaacagtatgatagtctcctcctcactttcggcggagggaccaaggtggagatcaa

SEQ ID NO: 7502 - DNA, 325 bp, Homo sapiens
gaaattgtgttgacgcagtctccaggcaccctgtctttgtctccaggggaaagagccaccctctcctgcagggccagtcagagtgttagcagcagctacttagcctggtaccagcagaaacctggccaggctcccaggctcctcatctatggtgcatccagcagggccactggcatcccagacaggttcagtggcagtgggtctgggacagacttcactctcaccatcagcagactggagcctgaagattttgcagtgtattactgtcagcagtatggtagctccccgtacacttttggccaggggaccaagctggagatcaaac

SEQ ID NO: 7503 - DNA, 325 bp, Homo sapiens; identical to SEQ ID NO: 7502

SEQ ID NO: 7504 - DNA, 325 bp, Homo sapiens; identical to SEQ ID NO: 7502

SEQ ID NO: 7505 - DNA, 331 bp, Homo sapiens
cagtctgccctgactcagcctccctccgcgtccgggtctcctggacagtcagtcaccatctcctgcactggaaccagcagtgacgttggtggttataactatgtctcctggtaccaacagcacccaggcaaagcccccaaactcatgatttatgaggtcagtaagcggccctcaggggtccctgatcgcttctccggctccaagtctggcaacacggcctccctgaccgtctctgggctccaggctgaggatgaggctgattattactgcagttcatatgcaggcagcaacaatttggtattcggcggagggaccaagctgaccgtcctag

SEQ ID NO: 7506 - DNA, 331 bp, Homo sapiens; identical to SEQ ID NO: 7505

SEQ ID NO: 7507 - DNA, 331 bp, Homo sapiens
cagtctgccctgactcagcctccctccgcgtccgggtctcctggacagtcagtcaccatctcctgcactggaaccagcagtgacgttggtggttataactatgtctcctggtaccaacagcacccaggcaaagcccccaaactcatgatttatgaggtcactaagcggccctcaggggtccctgatcgcttctccggctccaagtctggcaacacggcctccctgaccgtctctgggctccaggctgaggatgaggctgattattactgcagttcatatgcaggcagcaacaatttggtcttcggcggagggaccaaggtgaccgtcctag

SEQ ID NO: 7508 - DNA, 340 bp, Homo sapiens
gacatcgtgatgacccagtctccagactccctggctatgtctctgggcgagagggccaccatcaactgcaagtccagccagagtgttttagacggctccaacaatcagaactacttagcttggtaccagcagaaaccaggacagcctcctaacctgctcatttactgggcatctacccgggaatccggggtccctgaccgattcagtggcagcgggtctgggacagatttcactctcaccatcagcagcctgcaggctgaagatgtggcactttattactgtcagcaatattatagtactcccatcaccttcggccaagggacacgactggagattaaac

SEQ ID NO: 7509 - DNA, 340 bp, Homo sapiens; identical to SEQ ID NO: 7508

SEQ ID NO: 7510 - DNA, 340 bp, Homo sapiens; identical to SEQ ID NO: 7508

SEQ ID NO: 7511 - DNA, 340 bp, Homo sapiens
gacatcgtgatgacccagtctccagactccctggctgtgtctctgggcgagagggccaccatcaactgcaagtccagccagagtgtttcatacagctccaacaataagaactacttagcttggtaccagcagaaaccaggacagcctcctaagctgctcatttactgggcatctacccgggaatccggggtccctgaccgattcagtggcagcgggtctgggacagatttcactctcaccatcagcagcctgcaggctgaagatgtggcagtttattactgtcagcaatattatagtactctcctcactttcggcggagggaccaaggtggagatcaaac

SEQ ID NO: 7512 - DNA, 299 bp, Homo sapiens
gacatccagatgacccagtctccatcttccgtgtctgcatctgttgtcgggcaagtcagggttttagcatctggttcgcctggtatcagcagaaaccagggaaagcccctaagctcctgatctatgctgcatccagtttgcaatgtggggtcccttcaaggttcagcggcagtggatctgggacagatttcactctcaccatcagcagcctgcagcctgaagattttgcaacttactattgtcaacaggctaacactttgcgctcactttcggcggagggaccaaggtggagatcaaac

SEQ ID NO: 7513 - DNA, 340 bp, Homo sapiens; identical to SEQ ID NO: 7511

SEQ ID NO: 7514 - DNA, 331 bp, Homo sapiens
cagtctgccctgactcagcctccctccgcgtccgggtctcctggacagtcagtcaccatctcctgcactggatccagcagtgacgttggtggttatgactatgtctcctggtaccaacaacacccaggcaaagcccccaaactcatgatttatgacgtcactaagcggccctcaaaggtccctgatcgcttctttggctccaagtctgacaacacggcctccctgaccgtctctgggctccaggctgacgatgaggctcattattactgcagctcatatgcaggcgacaacatttgggtgttcggcggagggaccaagctgaccgtcctag

SEQ ID NO: 7515 - DNA, 331 bp, Homo sapiens
cagtctgccctgactcagcctccctccgcgtccgggtctcctggacagtcagtcaccatctcctgcactggatccagcagtgacgttggtggttatgactatgtctcctggtaccaacaacacccaggcaaagcccccaaactcatcatttatgacgtcagtaagcggccctcaaaggtccctgatcgcttctttggctccaagtctgacaacacggcctccctgaccgtctctgggctccaggctgaggatgaggctgattattactgcagctcatatgcaggcgacaacatttgggtgttcggcggagggaccaagctgaccgtcctag

SEQ ID NO: 7516 - DNA, 331 bp, Homo sapiens
cagtctgccctgactcagcctccctccgcgtccgggtctcctggacagtcagtcaccatctcttgcactggatccagcagtgacgttggtggttatgactatgtctcctggtaccaacaacacccaggcaaagcccccaaactcatgatttatgaggtcagtcagcggccctcaaaggtccctgatcgcttctttggctccaagtctgacaacacggcctccctgaccgtctctgggctccaggctgaggatgaggctgattattactgcagctcatatgcaggcgacaacatttgggtgttcggcggagggaccaagctgaccgtcctag

SEQ ID NO: 7517 - DNA, 325 bp, Homo sapiens
tcctatgtgctgactcagccaccctcagtgtcagtggccccaggaaagacggccaggattacctgtgggggaaacaacattggaagtaaaagtgtgcagtggtaccagcagaggccaggccaggcccctgtgctggtcatctattatgatagcgaccggccctcagggatccctgagcgattctctggctccaactctgggaacacggccaccctgaccatcagcagggtcgaagccggggatgaggccgactatttctgtcaggtgtgggatagtagcagtgatcatgtgatattcggcggagggaccaagctgaccgtcctag

SEQ ID NO: 7518 - DNA, 325 bp, Homo sapiens; identical to SEQ ID NO: 7517

SEQ ID NO: 7519 - DNA, 325 bp, Homo sapiens; identical to SEQ ID NO: 7517

SEQ ID NO: 7520 - DNA, 322 bp, Homo sapiens
gacatccagttgacccagtctccatccttcctgtctgcatctgtaggagacagagtcaccatcacttgccgggccagtcagggcattagcagttatttagcctggtatcagcaaaaaccagggaaagcccctaagctcctgatctatgctgcatccactttgcaaagtggggtcccatcaaggttcagcggcagtggatctgggacagaattcactctcacaatcagcagcctgcagcctgaagattttgcaacttattactgtcaacagcttaatagtgacccgctcactttcggcggagggaccaaggtggagatcaaac

SEQ ID NO: 7521 - DNA, 322 bp, Homo sapiens; identical to SEQ ID NO: 7520

SEQ ID NO: 7522 - DNA, 322 bp, Homo sapiens
gacatccagttgacccagtctccatccttcctgtctgcatctgtaggagacagagtcaccatcacttgccgggccagtcagggcattagcagttatttagcctggtatcagctaaaaccagggaaagcccctaagctcctgatctatgctgcatccactttgcaaagtggggtcccatcaaggttcagcggcagtggatctgggacagaattcactctcacaatcagcagcctgcagcctgaagattttgcaacttattactgtcaacagcttaatagtgactcgctcactttcggcggagggaccaaggtggagatcaaac

SEQ ID NO: 7523 - DNA, 322 bp, Homo sapiens
gacatccagatgacccagtctccttccaccctgtctgcatctgtaggagacagagtcaccatcacttgccgggccagtcagagtattagtaactggttggcctggtatcagcaggaaccagggaaagcccctaaactcctgatctataaggcgtctaatttagaaagtggggtcccatcaaggttcagcggcagtggatctgggacagaattcactttcaccatcagcagcctgcagcctgatgattttgcaacttattactgccaacagtatcatagttatccctgggcgttcggccaagggaccaaggtggaaatcaaac

SEQ ID NO: 7524 - DNA, 322 bp, Homo sapiens; identical to SEQ ID NO: 7523

SEQ ID NO: 7525 - DNA, 328 bp, Homo sapiens
cagtctgtgctgactcagccaccctcagcgtctgggacccccgggcagagggtcaccatgtcttgttctggaagcagctccaacatcggaagtaatactgtaagctggtaccagcacctcccaggaacggcccccaaactcctcatctatagtagtaatcagcggccctcaggggcccctgaccgattctctggctccaagtctggcacctcagcctccctggccatcagtgggctccagtctgaggatgaggctgattattactgtgcagcatgggacgacagcctgaatggtgtggtattcggcggagggaccaagctgaccgtcc

SEQ ID NO: 7526 - DNA, 328 bp, Homo sapiens
cagtctgtgctgactcagccaccctcagcgtctgggacccccgggcagagggtcaccatctcttgttctggaagcagctccaacatcggaagtaatactgtaagctggtaccagcacctcccaggaacggcccccaaactcctcatctatagtagtaatcagcggccctcaggggcccctgaccgattctctggctccaagtctggcacctcagcctccctggccatcagtgggctccagtctgaggatgaggctgattattactgtgcagcatgggatgacagcctgaatggtgtggtattcggcggagggaccaagctgaccgtcc

SEQ ID NO: 7527 - DNA, 330 bp, Homo sapiens
gatgttgtgatgactcagtctccactctccctgcccgtcacccttggacagccggcctccatctcctgcaggtctactcaaagcctcgtattgatgagaacacctacttgaattggtttcagcagaggccaggccaatctccaaggcgcctaatttataaggtttctaaccgggactctggggtcccagacagattcagcggcagtgggtcaggcactgatttcacactgaaaatcagcggggtggaggctgaggatgttggggtttattactgcatgcaaggtacacactggcctcccttcggccaagggacacgactggagattaaac

SEQ ID NO: 7528 - DNA, 331 bp, Homo sapiens
cagtctgtgttgacgcagccgccctcagtgtctgcggccccaggagagaaggtcaccatctcctgctctggaagcagctccaacattgggaatcattatgtatcctggtaccagcagctcccaggaacagcccccaaactcctcatttatgacaattataagcgaccctcagggattcctgaccgattctctggctccaagtctggcacgtcagccaccctgggcatcaccggactccagactggggacgaggccgattattactgcggaacatgggatagcagcctgagtgctggcgtgttcggcggagggaccaagctgaccgtcctag

SEQ ID NO: 7529 - DNA, 325 bp, Homo sapiens
tcctatgaactgactcagccaccctcagtgtccgtgtccccaggacagacagccagcatcccctgctctggagataaattggggattagatatacttgttggtatcagcagaagccaggccagtcccctgtgctggtcctctatgaagataacaagcgtccctcagggatccctgagcgattctctggctccaactctgggaacacagccactctgaccatcagcgggacccaggctatggatgaggctgactattactgtcaggcgtgggactccagcactgcagaggtggtattcggcggagggaccaagctgaccgtcctag

SEQ ID NO: 7530 - DNA, 319 bp, Homo sapiens
tcctatgaactgactcagccaccctcagtgtccgtgtccccaggacagacagccagcatcccctgctctggagataaattggggattagatatacttgctggtatcaacagaagccaggccagtcccctgtgctggtcctctatgaagataacaagcgtccctcagggatccctgagcgattctctggctccaactctgggaacacagccactctgaccatcagcgggacccaggctatggatgaggctgactactactgtcaggcgtgggacagcagcactgcggttttcggcggagggaccacggtgaccgtcctag

SEQ ID NO: 7531 - DNA, 322 bp, Homo sapiens
tcctatgagctgactcagccaccctcagtgtccgtgtccccaggacagacagccagcatcacctgctctggagataaattgggggataaatatgcttgctggtatcagcagaggccaggccagtcccctgtgctggtcatctatcaagataccaagcggccctcagggatccctgagcgattctctggctccaactctgggaacacagccactctgaccatcagcgggacccaggctatggatgaggctgactattactgtcaggcgtgggacagcagcactgccgtggtattcggcggagggaccaagctgaccgtcctag

SEQ ID NO: 7532 - DNA, 322 bp, Homo sapiens; identical to SEQ ID NO: 7531

SEQ ID NO: 7533 - DNA, 334 bp, Homo sapiens
cagtctgtgctgactcagccaccctcagcgtctgggacccccgggcagagggtcaccatctcttgttctggaagcagctccaacatcggaagtaatactgtaaactggtaccagcagctcccaggaacggcccccaaactcctcatctatagtaatagtcagcggccctcaggggtccctgaccgattctctggttccaagtctggcacctcagcctccctggccatcagtgggctccagtctgaagatgaggctgattattactgtgcagcatgggatgacagcctgaatggtttttatgtcttcggaactgggaccgaggtcaccgtcctag

SEQ ID NO: 7534 - DNA, 334 bp, Homo sapiens; identical to SEQ ID NO: 7533

SEQ ID NO: 7535 - DNA, 325 bp, Homo sapiens
gacatccagatgacccagtctccatcctccctgtctgcatctgtaggagacagagtcaccatcacttgccgggcaagtcagagcattagcagctatttaaattggtatcagcagaaaccacggaaagcccctaagctcctgatctatgctgcatccagtttgcaaagtggggtcccatcaaggttcagtggcagtggatctgggacagatttcactctcaccatcagcagtctgcaacctgaagattttgcaacttactactgtcaacagagttacagtacccctccgatcaccttcggccaagggacacgactggagattaaac

SEQ ID NO: 7536 - DNA, 325 bp, Homo sapiens
gacatccagatgacccagtctccatcctccctgtctgcatctgtaggagacagagtcaccatcacttgccgggcaagtcagagcattagtacctatttaaattggtatcagcagaaacaagggaaagcccctaagctcctgatctatgctgcatccagtttgcaaagtggggtcccatcaaggttcagtgccagtggatctgggacagatttcactctcaccatcagcagtctgcaacctgaagattttgcaacttactactgtcaacagagttacagtatgcctccgatcaccttcggccaagggacacgactggagattaaac

SEQ ID NO: 7537 - DNA, 328 bp, Homo sapiens
cagtctgccctgactcagcctcgctcagtgtccgggtctcctggacagtcagtcaccatctcctgcactggaaccagcagtgattttggtggttataactatgtctcctggtaccaacagtacccaggcaaagcccccaaactcatgatttatgatgtcaataagcggccctcaggggtccctgatcgcttctctggctccaagtctggcaacacggcctccctgaccatctctgggctccaatctgaggatgaggctgattattactgctgctcatatgcaggcagccattgggtgttcggcggagggaccaagctgaccgtcctag

SEQ ID NO: 7538 - DNA, 328 bp, Homo sapiens
cagtctgccctgactcagcctcgctcagtgtccgggtctcctggacagtcagtcaccatctcctgcactggaaccagcagtgattttggtggttataactatgtctcctggtaccatcaacacccaggcaaagcccccaaactcatgatttatgatgtcagtaagcggccctcaggggtccctgatcgcttctctggctccaagtctggcaacacggcctccctgaccatctctgggctccaggctgacgatgaggctgattattactgctgctcatatgcaggcagccattgggtgttcggcggagggaccaagctgaccgtcctag

SEQ ID NO: 7539 - DNA, 322 bp, Homo sapiens
gacatccagatgacccagtctccatcctccctgtctgcatctgtaggagacagagtcaccatcacttgccgggcaactcagaccattagcaactatttaaattggtatcagcagaaaccagggaaagcccctaagctcctgatctatgctgcaaccagtttgcaaagtggggtcccatcaaggttccgtggcagtggatctgggacagatttcactctcaccatcagcggtctgcaacctgaagattttgtaatttattactgtcaacagagttacagtatcccgtacacttttggccaggggaccaagctggagatcaaac

SEQ ID NO: 7540 - DNA, 322 bp, Homo sapiens; identical to SEQ ID NO: 7539

SEQ ID NO: 7541 - DNA, 322 bp, Homo sapiens
gaaatagtgatgacgcagtctccagccaccctgtctgtgtctccaggggaaagagccaccctctcctgcagggccagtcagagtgttaccagcaacttagcctggtaccagcaggaacctggccaggctcccaggctcctcatctatggtgcatccaccagggccactggtatcccagccaggttcagtggcagtgggtctgggacagagttcactctcaccatcagcagcctgcagtctgaagattttgcagtttattactgtcagcagtataataactggcccctcactttcggcggagggaccaaggtggagatcaaac

SEQ ID NO: 7542 - DNA, 322 bp, Homo sapiens; identical to SEQ ID NO: 7541

SEQ ID NO: 7543 - DNA, 322 bp, Homo sapiens
gacatccgggtgacccagtctccatcctccctgtcggcatctgtaggagacagagtcaccatcacttgccgggcaagtcagagcattaccaactatttaaattggtatcagcagaaaccagggaaagcccctaagctcctgatctatactgcatccagtttgcaaagtggggtcccatcaaggttcagtggcagtggatctgggacagatttcactctcaccatcagcagtctgcaacctgaagattttgcaacttactactgtcaacagagttacagtacccttttcactttcggccctgggaccaaagtggatatcaaac

SEQ ID NO: 7544 - DNA, 322 bp, Homo sapiens
gacatccagatgacccagtctccatcctccctgtctgcatctgtaggagacagggtcaccatcgcttgccgggcaagtcagagcattagcagctatttaaattggtatcagcagaaaccagggaaagcccctaagctcctgatctttactgcatccactttgcaaagtggggtcccatcaaggttcagtggcagtgggtctgggacagatttcactctcaccatcagcagtctgcaacctgaagattttgcaacttactactgtcagcagagttacagtacccttttcactttcggccctgggaccaaactggatatcaaac

SEQ ID NO: 7545 - DNA, 331 bp, Homo sapiens
cagtctgtattgacgcagccgccctcagtgtctgcggccccaggacagaaggtcaccatctcctgctctggaagcagctccactattggaagtaattatgtatcctggtaccagcagctcccaggaacagcccccaaactcctcatttatgacactaagaagcgaccctcaggaattcctgaccgattctctgcctccaagtctgacacgtcagccaccctgggcatcaccggactccagactggggacgaggccgattactactgcggaacatgggatagcagcctaagtgtttatgtcttcggaactgggaccaaggtcaccgtcctag

SEQ ID NO: 7546 - DNA, 331 bp, Homo sapiens
cagtctgtattgacgcagccgccctcagtgtctgcggccccaggacagaaggtcaccctctcctgctctggaagcagctccactattggaagtaattatgtatcctggtaccagcagctcccaggaacagcccccaaactcctcatttatgacactaagaagcgaccctcaggaattcctgaccgattctctgcctccaagtctgacacgtcagccaccctgggcatcaccggactccagactggggacgaggccgattactactgcggaacatgggatagcagcctaagtgtttatgtcttcggaactgggaccaaggtcaccgtcctag

SEQ ID NO: 7547 - DNA, 334 bp, Homo sapiens
cagtctgccctgactcagcctgcctccgtgtctgggtctcctggacagtcgatcaccatctcctgcactggaaccagcagtgacgttggtggttataactatgtctcctggtaccaacaacacccaggcaaagcccccaaactcatgatttatgatgtcagtaatcggccctcaggggtttctaatcgcttctctggctccaagtctggcaacacggcctccctgaccatctctgggctccaggctgaggacgaggctgattattactgcagctcatatacaagcagcagccttaattgggtgttcggcggagggaccaagctgaccgtcctag

SEQ ID NO: 7548 - DNA, 334 bp, Homo sapiens; identical to SEQ ID NO: 7547

SEQ ID NO: 7549 - DNA, 328 bp, Homo sapiens
gaaattgtgttgacgcagtctccaggcaccctgtctttgtctccaggggaaagagccaccctctcctgcagggccagtcagagtgttaccagcagctatttagcctggtaccagcagaaacctggccaggctcccaggctcctcatctacggtgcatccagcagggccactggcatcccagacaggttcagtggcagtgggtctgggacagacttcactctcaccatcagcagactggagcctgaagattttgcagtgtattactgtcagcagtatggtagctcacctccgtacagttttggccaggggaccaagctggagatcaaac

SEQ ID NO: 7550 - DNA, 328 bp, Homo sapiens; identical to SEQ ID NO: 7549

SEQ ID NO: 7551 - DNA, 325 bp, Homo sapiens
cagtctgccctgactcagcctgcctccgtgtctgggtctcctggacagtcgatcaccatctcctgcactggaaccagcagtgacgttggtggttataactatgtctcctggtaccaacaacacccaggcaaagcccccaaactcatgatttatgatgtcagtaatcggccctcaggggtttctaatcgcttctctggctccaagtctggcaacacggcctccctgaccatctctgggctccaggctgaggacgaggctgattattactgcagctcatatacaagcaccgtggtattcggcggagggaccaagctgaccgtcctag

SEQ ID NO: 7552 - DNA, 334 bp, Homo sapiens
cagtctgccctgactcagcctgcctccgtgtctgggtctcctggacagtcgatcaccatctcctgcactggaaccagcagtgacgttggtggttataactatgtctcctatgtctcctggtaccagcaacacgcagacaaagcccccaaactcatgatttatgatgtcagttatcggccctcaggggtttctaatcgcttctctggctccaagtctggcaacacggcctccctgaccatctctgggctccaggctgaggacgaggctgattattactgcagctcatacacaagcaccgtggtcttcggcggagggaccaagctgaccgtcctag

SEQ ID NO: 7553 - DNA, 322 bp, Homo sapiens
gacatccagatgacccagtctccatcctccctgtctgcatctgtaggagacagagtcaccatcacttgccgggcaagtcagagcattgccggctatttaaattggtatcagcagaaaccagggaaagcccctaaactcctgatctttgctgcatccagtttgcaaagtggggtcccttcaaggttcagtggcattggatctgggacagatttcactctcaccatcagcagtctgcaacctgaagattttgcaacttactactgtcaacagagttacaatgcccctttcaccttcggccaggggacacgactggaaattaaac

SEQ ID NO: 7554 - DNA, 322 bp, Homo sapiens; identical to SEQ ID NO: 7553

SEQ ID NO: 7555 - DNA, 322 bp, Homo sapiens
gacatccagttgacccagtctccttccttcctgtctgcatctgtaggagacagagtcaccatcacttgccgggccagtcagggcattagcagttatttagcctggtatcagcaaaaaccagggaaagcccctaagctcctgatctatgctgcatccactttgcaaagtggggtcccatcaaggttcagcggcagtggatctgggacagaattcactctcacaatcagcagcctgcagcctgaagattttgcaacttattactgtcaacagcttaatagttacccgctcactttcggcggagggaccaaggtggagatcaaac

SEQ ID NO: 7556 - DNA, 322 bp, Homo sapiens; identical to SEQ ID NO: 7555

SEQ ID NO: 7557 - DNA, 331 bp, Homo sapiens
cagtctgccctgactcagcctgcctccgtgtctgggtctcctggacagtcgatcaccatctcctgctctggaaccagcagtgacgttggtgcttataactttgtctcctggtaccaacaacacccaggcaaggcccccacactcatgatttttgatgtcagtggtcggccctcaggggtttctagtcgcttctctggctccaagtctggcaacacggcctccctgaccatctctgggctccaggctgaggacgaggctgattattactgcagctcatatacaaccagcaggggagttgtgttcggcggtgggaccaagctgaccgtcctag

SEQ ID NO: 7558 - DNA, 331 bp, Homo sapiens; identical to SEQ ID NO: 7557

SEQ ID NO: 7559 - DNA, 325 bp, Homo sapiens
gaaatggtgatgacgcagtctccaggcaccctgtctatgtctccaggggaaagagccaccctctcctgcagggccagtcagagtgttagcagcttcttagcctggtaccagcagaaacctggccaggctcccaggctcctcatctatggtgcattcaccagggccactggtatcccagccaggttcagtggcagtgggtctgggacagagttcactctcaccatcagcagcctgcagtctgaagattttgcagtttattactgtcaacaatattataactggcctgcggtcactttcggcggagggaccaaggtggagatcaaac

SEQ ID NO: 7560 - DNA, 322 bp, Homo sapiens
gacatccagatgacccagtctccatcctccctgtctgcatctgtaggagacagagtcaccatcacttgccgggcgagtcagggcattagcaattatttagcctggtatcagcagaaaccagggaaagttcctaagctcctgatctatgctgcatccactttgctatcaggggtcccatctcggttcagtggcagtggatctgggacatatttcactctcaccatcagcagcctgcagcctgaagatgttgcaacttattactgtcaaaagtataacagtgcccccctcactttcggcggagggaccaaggtggagatcaaac

SEQ ID NO: 7561 - DNA, 322 bp, Homo sapiens
gacatccagatgacccagtctccatcctccctgtctgcatctgtaggagacagagtcaccatcacttgccgggcaagtcagggcattagaaatgatttaggctggtatcagcagaaaccagggaaagcccctaagcgcctgatctatgctgcatccagtttgcaaagtggggtcccatcaaggttcagcggcagtggatctgggacagaattcactctcacaatcagcagcctgcagcctgaagattttgcaacttattactgtctacagcataatacttacccgctcactttcggcggagggaccaaggtggagatcaaac

SEQ ID NO: 7562 - DNA, 322 bp, Homo sapiens
gacatccagatgacccagtctccatcctccctgtctgcatctgtaggagacagagtcaccatcacttgccgggcaagtcagggcattagaaatgatttaacctggtatcagcagaaaccagggaaagcccctaaacgcctgatctatgctgcatccagtttgcaaagtggggtcccgtcaaggttcagcggcagtggatctgggacagaattcactctcacaatcagcagcctgcagcctgaagattttgcaacttattactgtctgcagcataatggttaccctctcactttcggcggagggaccaaggtggagatcaaac

SEQ ID NO: 7563 - DNA, 331 bp, Homo sapiens
cagtctgccctgactcagcctgcctccgtgtctgggtctcctggacagtcgatcaccatctcctgcactggaaccagcagtgacgttggtggttataactatgtctcctggtaccaacttcacccaggcaaagcccccaaactcatgatttatgatgtcagtaatcggccctcaggggtttctaatcgcttctctggctccaagtctggcaacacggcctccctgaccatctctgggctccaggctgaggacgaggctgattactactgcagctcatatacaagcagcagcactcgagtattcggcggagggaccaagctgaccgtcctag

SEQ ID NO: 7564 - DNA, 331 bp, Homo sapiens
cagtctgtgttgacgcagccgccctcagtgtctgcggccccaggacagaaggtcaccatctcctgctctggaagcagctccaacattggaaataattatgtatcctggtaccagcagctcccaggaacagcccccaaactcctcatttatgacaataatgagcgaccctcagggattcctgaccgattctctggctccaagtctggcacgtcagccaccctgggcatcaccggactccagactggggacgaggccgattattactgcggaacatgggatagcagcctgagtgcttgggtgttcggcggagggaccaagctgaccgtcctag

SEQ ID NO: 7565 - DNA, 331 bp, Homo sapiens
cagtctgccctgactcagcctgcctccgtgtctgggtctcctggacagtcgatcaccatctcctgcactgggaccagcagtgacgttggtgcttataactatgtctcctggtaccaacaacacccaggcaaagcccccaaactcatgatttatgatgtcagtgatcggccctcaggggtttctaatcgcttctctggctccaagtctggcaacacggcctccctgaccatctctgggctccaggctgaggacgaggctgattattactgcagctcatatacaagcaacaacattgtcttattcggcggagggaccaagctgaccgtcctag

SEQ ID NO: 7566 - DNA, 322 bp, Homo sapiens
gacatccagatgacccagtctccatcctccctgtctgcatctgtaggagacagagtcaccatcacttgccgggcaagtcagagcattagcagctctttaaattggtatcagcagaaaccagggaaagcccctaagctcctgatctatgctgcatccagtttgcaaagtggggtcccatcaaggttcagtggcagtggatctgggacagatttcactctcaccatcagcagtctgcaacctgaagattttgcaacttactactgtcaacagagttacagtaccccgtacacttttgtccaggggaccaagctggagatcaaac

SEQ ID NO: 7567 - DNA, 330 bp, Homo sapiens
cagtctgtgctgactcagccaccctcagcgtctgcgacccccgggcagagggtcaccatctcttgttctgggagcaactccaacatcggaagtaatactgtaagctggtaccagcagctcccaggaacggcccccaaactcctcatctatcgaaataatgagcgtccctcaggggtccctgaccgattctctggctccaagtctggcacctcagcctccctggccatcagtgggctccagtctgaggatgaggctgattattactgtgccgcatgggatgacagtctgaatgggtgggcgttcggcggagggaccgagctgaccgtccta

SEQ ID NO: 7568 - DNA, 330 bp, Homo sapiens; identical to SEQ ID NO: 7567

SEQ ID NO: 7569 - DNA, 322 bp, Homo sapiens
gacatccagatgacccagtctccatcctcactgtctgcatctgtaggagacagagtcaccatcacttgtcgggcgagtcagggtattagcagctggttagcctggtatcagcagaaaccagagaaggcccctaagtccctgatctatgatgcatccagtttgcgaagtggggtcccatcaaggttcagcggcagtggatctgggacagatttcactctcaccatcagcggcctgcagcctgaagattttgcaacttattactgcctacagtataatacttaccctctgactttcggcggagggaccaaggtggagatcaaac

SEQ ID NO: 7570 - DNA, 322 bp, Homo sapiens; identical to SEQ ID NO: 7569

SEQ ID NO: 7571 - DNA, 334 bp, Homo sapiens
cagtctgtgttgacgcagccgccctcagtgtctgcggccccaggacagaaggtcaccatctcctgctctggaagcagctccaacattgggaataattatgtatcctggtaccagcagctcccaggaacagcccccaaactcctcatttatgacaatgataagcgaccctcagggattcctgaccgattcgctggctccaagtctggcacgtcagccaccctgggcatcaccggactccagactggggacgaggccgattattactgcggaacatgggataccagcctgagtgctcctggggtcttcggaactgggaccaaggtcaccgtcctag

SEQ ID NO: 7572 - DNA, 334 bp, Homo sapiens
cagtctgtgttgacgcagccgccctcagtgtctgcggccccaggacagaaggtcaccatctcctgctctggaagcagctccaacattgggaataattatgtatcctggtaccagcagctcccaggaacagcccccaaactcctcatttatgacaataataagcgaccctcagggattcctgaccgattctctggctccaagtctggcacgtcagccaccctgggcatcaccggactccagactggggacgaggccgattattactgcggaacatgggataccagcctgagtgctcctggggtcttcggaactgggaccaaggtcaccgtcctag

SEQ ID NO: 7573 - DNA, 322 bp, Homo sapiens
gacatccagatgacccagtctccatcctccctgtctgcatctgtaggagacagagtcaccatcacttgccgggcaagtcagagcattagcagctatttaaattggtatcagcagaaaccagggaaagcccctaagctcttgatctatgctgcatccagtttgcaaagtggggtcccatcaaggttcagtggcagtggatctgggacagatttcactctcaccatcagcagtctgcaacctgaagattttgcaacttactactgtcagcagagttacagtacccctcgaacttttggccaggggaccaagctggagatcaaac

SEQ ID NO: 7574 - DNA, 322 bp, Homo sapiens
gacatccagatgacccagtctccatcctccctgtctgcatctgtaggagacagagtcaccatcacttgccgggcaagtcagagcattagcagttatttaaattggtatgagcagaaaccagggaaagcccctaagctcctgatctatgctgcctccagtttgcaaagtggggtcccatcaaggttcagtggcagtggatctgggacagatttcactctcaccatcagcagtctgcaacctgaagattttgcaacttactactgtcaacagagttacagtattcttcgaacttttggccaggggaccaagctggagatcaaac

SEQ ID NO: 7575 - DNA, 319 bp, Homo sapiens
gaaattgtgttgacgcagtctccaggcaccctgtctttgtctccaggggaaagagccaccctctcctgccgggccagtcagagtgttagcaggaactacttagcctggtaccaacagagacctggccaggctcccaggctcctcatctatggtgtctccagcagggccactggcatcccagacagattcagtggcagtgggtctgggacagacttcactctcaccatcagcagactggcgcctgaagattttgcagtgtattactgtcagcaatatggtagctcgcatttcggccctgggaccaaagtggatatcaaac

SEQ ID NO: 7576 - DNA, 319 bp, Homo sapiens
gaaattgtgttgacgcagtctccaggcaccctgtctttgtctccaggggaaagagccaccctctcctgccgggccagtcagagtgttaccaggaactacttagcctggtaccaacagagacctggccaggctcccaggctcctcatctatggtgtctccagcagggccactggcatcccagacagattcagtggcagtgggtctgggacagacttcactctcagcatcaacagactggcgcctgaagattttgcagtgtattactgtcagcaatatggtagctcgcatttcggccctgggaccaaagtggatatcaaac

SEQ ID NO: 7577 - DNA, 325 bp, Homo sapiens
tcctatgtgctgactcagccaccctcagtgtcagtggccccaggaaagacggccaggattacctgtgggggaaacaacattggaagtaaaagtgtgcactggtaccagcagaagccaggccagacccctgtgctggtcatctattatgatagcgaccggccctcagggatccctgagcgattctctggctccaactctgggaacacggccaccctgaccatcagcagggtcgaagccggggatgaggccgactattactgtcaggtgtgggatagtagtagtgatcatgtggtattcggcggagggaccaagctgaccgtcctag

SEQ ID NO: 7578 - DNA, 325 bp, Homo sapiens
tcctatgtgctgactcagccaccctcagtgtcagtggccccaggaaagacggccaggattacctgtgggggaaacaacattggaagtaaaagtgtgcactggtaccagcagaagccaggccaggcccctgtgctggtcatctattatgacagcgaccggccctcagggatccctgagcgattctctggctccaactctgggaacacggccaccctgaccatcagcagggtcgaagccggggatgaggccgactattactgtcaggtgtgggatagtagtagtgatcatgtggtattcggcggagggaccaagctgaccgtcctag

SEQ ID NO: 7579 - DNA, 325 bp, Homo sapiens
gaaattgtgttgacacagtctccaggcaccctgtctttgtctccaggggaaagagccaccctctcctgcagggccagtcagagtgttaacagcaactccttagcctggtaccagcagaaacctggccaggctcccaggctcctcatctatggtgcatccagcagggccactggcatcccagacaggttcagtggcagtgggtctgggacagacttcactctcaccatcagcagactggagcctgaagattttgcagtgtattactgtcagcagtatgatagctcacctcgaacgttcggccaagggaccaaggtggaaatcaaac

SEQ ID NO: 7580 - DNA, 322 bp, Homo sapiens
gaaatagtgatgacgcagtctccagccaccctgtctgtgtctccaggggaaagagccaccctctcctgcagggccagtcagagtgttagcagcaacttagcctggtaccagcagaaacctggccaggctcccaggctcctcatctatggtgcatccaccagggccactggtatcccagtcaggttcagtggcagtgggtctgggacagagttcactctcaccatcagcagcctgcagtctgaagattttgcagtttattactgtcagcagtataataactggcctcggacgttcggccaagggaccaaggtggaaatcaaac

SEQ ID NO: 7581 - DNA, 325 bp, Homo sapiens
gacatccagatgacccagtctccatcctccctgtctacatctgtaggagacagagtcaccatcacttgccaggcgagtcaggacattagcaactttttaaattggtatcagcagaaaccagggaaagcccctaagctcctgatctacgatgcttccaatttggaaataggggtcccatcaaggttcagtggaagtggatctgggacagattttactttcaccatcagcagcctgcagcctgaagatattgcaacatattactgtcaacactatgatgatctccctccgtacccttttggccaggggaccaagctggagatcaaac

SEQ ID NO: 7582 - DNA, 324 bp, Homo sapiens
gacatccagatgacccagtctccatcctccctgtctgcatctgtaggagacagagtcaccatcacttgccaggcgactcaggacattaacatctatttaaattggtatcagcagaaaccagggaaagcccctaagctcctgatctacgatgcatccaatttggaaacaggggtcccatcaaggttcagtggaagtggatctgggacagattttactttcaccatcagcagcctgcagcctgaagatattgcaacatattactgtcaacactatgataatttccctccgtacacttttggccaggggaccaagctggagatcaaa

SEQ ID NO: 7583 - DNA, 322 bp, Homo sapiens
tcctatgagctgactcagccaccctcagtgtccgtgtcccctggacagacagccagcatcacctgctctggagataaattggggaataaatatacttcctggtatcagcagaggccaggccagtcccctgtgctggtcatctatcaagatagcaagcggccctcagggatccctgagcgattctctggctccaactctgggaacacagccactctgaccatcagcgggacccaggccatggatgaggctgactattactgtcaggcgtgggacaacagcatttatgtggtattcggcggagggaccaagctgaccgtcctag

SEQ ID NO: 7584 - DNA, 322 bp, Homo sapiens; identical to SEQ ID NO: 7583

SEQ ID NO: 7585 - DNA, 322 bp, Homo sapiens
gacatccagttgacccagtctccatccttcctgtctgcatctgtaggagacagagtcaccatcacttgccgggccagtcagggcattagcagttatttagcctggtatcagcaaaaaccagggaaagcccctaagctcctgatctatgctgcatccactttgcaaagtggggtcccgtcaaggttcagcggcggtggatctgggacagacttcactctcacaatcagcagcctgcagcctgaagattctgcaacttattactgtcaacagcttactagttaccctccggctttcggcggagggaccaaggtggagatcaaac

SEQ ID NO: 7586 - DNA, 322 bp, Homo sapiens
gacatccagttgacccagtctccatccttcctgtctgcatctgtaggagacagagtcaccatcacttgccgggccagtcagggcattagcagttatttagcctggtatcagcaaaaaccagggaaagcccctaagctcctgatctatgctgcatccactttgcaaagtggggtcccatcaaggttcagcggcagtggatctgggacagaattcactctcacaatcagcagcctgcagcctgaagattttgcaacttattactgtcaacagcttaatagttaccctccggctttcggcggagggaccaaggtggagatcaaac

SEQ ID NO: 7587 - DNA, 329 bp, Homo sapiens
cagtctgtgctgactcaaccaccctcagcgtctgggacccccgggcagagggtctccatctcttgttctggaagcagctccaacatcggaagttattctgtaaactggtaccagcaactcccaggaacggcccccaaactcctcacctctagtaataatcagcggccctcaggggtccctgaccgattctctggctccaagtctggcacctcagcctccctggccatcagtgggctccagtctgaggatgaggctgattattactgtgcagcatgggatgacagcctgaatggtccaatattcggcggagggaccaaactgaccgtcct

SEQ ID NO: 7588 - DNA, 329 bp, Homo sapiens
cagtctgtgctgactcaaccaccctcagcgtctgggacccccgggcagacggtctccatctcttgttctggaagcagctccaacatcggacgttattctgtaaactggtaccagcaactcccaggaacggcccccaaactcctcacctctagtgataatcagcggccctcaggggtccctgaccgattctctgcctccaagtctggcacctcagcctccctggccatcagtgggctccagtctgaggatgaggctgattattactgtgcagcatgggatgacagcctgaatggtccaatattcggcggagggaccaaactgaccgtcct

SEQ ID NO: 7589 - DNA, 331 bp, Homo sapiens
cagtctgccctgactcagcctcgctcagtgtccgggtctcctggacagtcagtcaccatctcctgcactggaaccaacagtgatgttggtgcttatgactatgtctcctggtaccaacagcacccaggcagagcccccaaactcatgatttatgatgtcaataagcggccctcaggggtccctgatcgcttctctggctccaagtctggcaacacggcctccctgattatctctgggctccaggctgacgatgaggctgattattactgctgctcatatgcaggcggcgacacttttgtcttcggaactggggccgaggtcaccgtcctag

SEQ ID NO: 7590 - DNA, 331 bp, Homo sapiens
cagtctgccctgactcagcctcgctcagtgtccgggtctcctggacagtcagtcaccatctcctgcactggaaccagcagtgatgttggtggttatgactatgtctcctggtaccaacagcacccagtcaaagcccccaaactcatgatttatgatgtcactaagcggccctcaggggtccctgatcgcttctctggctccaagtctggcaacacggcctccctgattatctctgggctccaggctgaggatgaggctgattattactgctgctcatatgcaggcggcgacacttttgtcttcggaattgggaccaaggtcaccgtcctag

SEQ ID NO: 7591 - DNA, 337 bp, Homo sapiens
cagtctgtgctgacgcagccgccctcagtgtctggggccccagggcagagggtcaccatctcctgcactgggagcagctccaacatcggggcagattatgatgtacactggtaccagcaggttccaggaacagcccccaaactcctcatctatggtaacaacaatcggccctcaggggtccctgaccgattctctggctccaggtctggcacctcagcctccctggccatcactgggctccaggctgaggatgaggctgattattactgtcagtcctatgacagcagcctgagtggttcgagggtgttcggcggagggaccaagctgaccgtcctag

SEQ ID NO: 7592 - DNA, 337 bp, Homo sapiens; identical to SEQ ID NO: 7591

SEQ ID NO: 7593 - DNA, 327 bp, Homo sapiens
aaactgtgttgacgcagtctccagacaccctgtctttgtctccaggggagagagccaccctctcctgcagggccagtcagagtgttaccagcacctacttagcctggtaccagctgaaacctggccaggctcccaggctcctcatctatggggcatccggcagggccactggcatcccagacaggttcagtggcagtgggtctgggacagacttcactctcaccatcagcagactggagcctgaagattttgcagtgtattactgtcagcagtatggtagctcacctcggtacacttttggccaggggaccaagctggagatcaaac

SEQ ID NO: 7594 - DNA, 327 bp, Homo sapiens
aaactgtgttgacgcagtctccagacaccctgtctttgtctccaggggagagagccaccctctcctgcagggccagtcagagtgttaccagcagctacttagcctggtaccagctgaaacctggccaggctcccaggctcctcatctatggtgcatccggcagggccactggcatcccagacaggttcagtggcagtgggtctgggacagacttcactctcaccatcagcagactggagcctgaagattttgcagtgtattactgtcagcagtatggtagctcacctcggtacacttttggccaggggaccaagctggagatcaaac

SEQ ID NO: 7595 - DNA, 325 bp, Homo sapiens
gacatccagatgacccagtctccatcctccctgtctgcatctgtaggagacagagtcaccatcacttgccgggcaagtcagaggattagcagctttttaaattggtatcagcagaaaccaggaaaagcccctaagctcctgatctttgctgcatccagtttgcaaagtggggtcccatcaaggttcagtggcagtggatctgggacagacttcactctcaccatcagcagtctgcaacctgaagattttgcaacttactactgtcaacagagttacagtactcccccgtggacgttcggccaagggaccaaggtggaaatcaaac

SEQ ID NO: 7596 - DNA, 325 bp, Homo sapiens; identical to SEQ ID NO: 7595

SEQ ID NO: 7597 - DNA, 323 bp, Homo sapiens
gaaattgtgttgacgcagtctccaggcaccctgtctttgtctccaggggaaagctccaccctctcctgcagggccagtcagagtattagcagcagctacttagcctggttccagcagaaacctggccaggctcccaggctcctcatctatgctacatccagcagggccattggcatcccagacaggttcagtggcagtgggtctgggacagacttcactctcaccatcagcagactggagcctgaagattttgcagtgtattactgtcagcagtatggtacctcaccgtggacgttcggccaagggaccaaggtggaaatcaa

SEQ ID NO: 7598 - DNA, 325 bp, Homo sapiens
gaaattgtgttgacgcagtctccaggcaccctgtctttgtctccaggggaaagagccaccctctcctgcagggccagtcagagtgttaatactaattatttagcctggtaccagcagaaacctggccaggctcccaggctcctcatctatgctgcatccagcagggccattggcatcccagacaggttccgtggcagtgggtctgggacagacttcactctcaccatcagcagactggagcctgaagattttgcagtgttttactgtcagcagtatggtagctcaccgtggacgttcggccaagggaccaaggtggaaatcaaac

SEQ ID NO: 7599 - DNA, 322 bp, Homo sapiens
gacatccagatgacccagtctccatcctcactgtctgcatctgtaggagacagagtcaccatcacttgtcgggcgagtcagggcattagcaattatttagcctggtttcagcagaaaccagggaaagcccctaagtccctgatctatgctgcatccagtttgcaaagtggggtcccatcaaagttcagcggcagtggatctgggacagatttcactctcaccatcagcagcctgcagcctgaagattttgcaacttattactgccaacagtataatagttacccattcactttcggccctgggaccaaagtggatatcaaac

SEQ ID NO: 7600 - DNA, 322 bp, Homo sapiens; identical to SEQ ID NO: 7599

SEQ ID NO: 7601 - DNA, 337 bp, Homo sapiens
cagtctgtgttgacgcagccgccctcagtgtctgcggccccaggacagaaggtcaccatctcctgctctggaagcagctccaacattgggaataattatgtatcctggtaccagcagctcccaggaacagcccccaaactcctcatttatgacaataataagcgaccctcagggattcctgaccgattctctggctccaagtctggcacgtcagccaccctgggcatcaccggactccagactggggacgaggccgattattactgcggaacatgggatagcagcctgagtgatggctcctatgtcttcggaactgggaccaaggtcaccgtcctag

SEQ ID NO: 7602 - DNA, 331 bp, Homo sapiens
gaaattgtgttgacacagtctccagtcaccctgtctttgtctccaggggaaagagccaccctctcctgcagggccagtcagagtgttagcagctacatagcctggtaccaacagaaacctggccaggctcccaggctcctcatctatgatgcattcaacagggccactggcatcccagccaggttcagtggcagtgggtctgggacagacttcactctcaccatcagcagcctagagcctgaagattttgcagtttattactgtcagcagcgtaccaactggcctccatccgcccccactttcggcggagggaccaaggtggagatcaaac

SEQ ID NO: 7603 - DNA, 322 bp, Homo sapiens; identical to SEQ ID NO: 837

SEQ ID NO: 7604 - DNA, 325 bp, Homo sapiens; identical to SEQ ID NO: 1686

SEQ ID NO: 7605 - DNA, 322 bp, Homo sapiens; identical to SEQ ID NO: 1778

SEQ ID NO: 7606 - DNA, 325 bp, Homo sapiens
gaaattgtgttgacacagtctccagccaccctgtctttgtctccaggggaaagagccaccctctcctgcagggccagtcagagtgttagcagctacttagcctggtaccaacagaaacctggccaggctcccaggctcttcatctatgatgcatccaacagggccactggcatcccagccaggttcagtggcagtgggtctgggacagacttcactctcaccatcagcagcctagagcctgaagattttgcagtttattactgtcagcagcgtagcaactggcctcaaatcaccttcggccaagggacacgactggagattaaac

SEQ ID NO: 7607 - DNA, 328 bp, Homo sapiens
tcctttgtgctgactcagccaccctcggtgtcagtggccccaggacagacggccaggattacctgtgggggaaacaacattggaagtaaaagtgtgcactggtatcagcagaagccaggccaggcccctgtgctggtcgtctatgctggtaacgaccggccctcagggatccctgagcgattctctggctccaactctgggaacacggccaccctgaccatcagcagggtcgaagccggggatgaggccgactattactgtcaggtgtgggatagtagtagtgatcatttttatgtcttcggaactgggaccaaggtcaccgtcctag

SEQ ID NO: 7608 - DNA, 322 bp, Homo sapiens
gccatccggatgacccagtctccatcctcattctctgcatctacaggagacagagtcaccatcacttgtcgggcgagtcagggtattagcagttatttagcctggtatcagcaaaaaccagggaaagcccctaagctcctgatctatgctgcatccactttgcaaagtggggtcccatcaaggttcagcggcagtggatctgggacagatttcactctcaccatcagctgcctgcagtctgaagattttgcaacttattactgtcaacagtattatagttacccgatcaccttcggccaagggacacgactggagattaaac

SEQ ID NO: 7609 - DNA, 337 bp, Homo sapiens
gatattgtgatgactcagtctccactctccctgcccgtcacccctggagagccggcctccatctcctgcaggtctagtcagagcctcctgcatagtaatggatacaactatttggattggtacctgcagaagccagggcagtctccacagctcctgatctatttgggttctaatcgggcctccggggtccctgacaggttcagtggcagtggatcaggcacagattttacactgaaaatcagcagagtggaggctgaggatgttggggtttattactgcatgcaaactctacccctccgccccactttcggcggagggaccaaggtggagatcaaac

SEQ ID NO: 7610 - DNA, 325 bp, Homo sapiens
tcttctgagctgactcaggaccctgctgtgtctgtggccttgggacggacagtcaggatcacatgccaaggagacagcctcagaagctattatgcaagctggtaccagcagaagccaggacaggcccctgtacttgtcatctatggtaaaaacaaccggccctcagggatcccagaccgattctctggctccagctcaggaaacacagcttccttgaccatcactggggctcaggcggaagatgacgctgactattactgtatctcccgggacagcagtggtaaccatgtggtattcggcggagggaccaagctgaccgtcctag

SEQ ID NO: 7611 - DNA, 325 bp, Homo sapiens
gaaattgtgttgacgcagtctccaggcaccctgtctttgtctccaggggaaagagtcaccctctcctgcagggccagtcagagtgttagcagcacctacctagcctggtaccagcagaaacctggccaggctcccaggtcctcatctatggtgcatccagcagggccactggcatcccagacaggttcagtggcagtgggtctgggacagacttcactctcaccttcagcagactggagcctgaagattttgcagtatattactgtcaacactatcgtagctcacccgtggacgttcggccaagggaccaaggtggaaatcaaac

SEQ ID NO: 7612 - DNA, 319 bp, Homo sapiens
tcctatgagctgactcagccaccctcagtgtccgtgtccccaggacagacagccagcatcacctgctctggagataaattgggggataaatatgtttgctggtatcagcagaagtcaggccagtcccctgtgttggtcatctatcaagatagtaagaggccctcagggatccctgagcgattctctggctccaactctgggaacacagccacgctgaccatcagcgggacccaggctatggatgaggctgactattactgtcaggcgtgggacagcagcactgcggtattcggcggagggaccaaggtgaccgtcctag

SEQ ID NO: 7613 - DNA, 319 bp, Homo sapiens
gaaattgtattgacacagtctccagccaccctgtctttatctccaggggaaagagccaccctctcctgcagggccagtcagactgttagcaactacttagcctggtaccaacagaaacctggccaggctcccaggctcctcatctatgatacatccaacagggccactggcatttcagccaggttcagtggcagtgggtctgggacagacttcactctcaccatcagcagcctagagactgaagattttgcagtttattactgtcagcagcgtagcaactggcctctcactttcggcggagggaccaaggtggagatca

SEQ ID NO: 7614 - DNA, 322 bp, Homo sapiens
gacatccagatgacccagtctccatcctcactgtctgcatctgtaggagacacagtcaccatcacttgtcgggcgagtcagggcattagcaattatttagcctggtttcagcagaagccagggaaagcccctaagtccctgatctatgctgcatccagtttgcaaagtggggtcccatcaaagttcagcggcagtggatctgggacagatttcactctcaccatcagcagcctgcagcctgaagattttgcaacttattactgccaacagtataatagttaccctctcactttcggcggagggaccaaggtggagatcaaac

SEQ ID NO: 7615 - DNA, 337 bp, Homo sapiens
cagtctgtgctgacgcagccgccctcagtgtctggggccccagggcagagggtcaccatctcctgcactgggagcagctccaacatcggggcaggttatgatgtacactggtaccagcagcttccaggaacagcccccaaactcctcatctatggtaacagcaatcggccctcaggggtccctgaccgattctctggctccaagtctggcacctcagcctccctggccatcactgggctccaggctgaggatgaggctgattattactgccagtcctatgacagcagcctgagtggtcttgtggtattcggcggagggaccaagctgaccgtcctag

SEQ ID NO: 7616 - DNA, 316 bp, Homo sapiens
tcctatgagctgacacagccaccctcggtgtcagtgtccctaggacagatggccaggatcacctgctctggagaagcattgccaaaaaaatatgcttattggtaccagcagaagccaggccagttccctgtgctggtgatatataaagacagcgagaggccctcagggatccctgagcgattctctggctccagctcagggacaatagtcaccttgaccatcagtggagtccaggcagaagacgaggctgactattactgtctatcagcagacagcagtggtacttatccccgtggcaccaaggtgaccgtcctcg

SEQ ID NO: 7617 - DNA, 325 bp, Homo sapiens
tcctatgtgctgactcagccaccctcggtgtcagtggccccaggacagacggccaggattacctgtgggggaaacaacattggaagtaaaaatgtgcactggtaccagcagaagccaggccaggcccctgtgctggtcgtctatgatgatcacgaccggccctcagggatccctgagcgattctctggctccaactctgggaacacggccaccctgaccatcagcagggtcgaagccggggatgaggccgactattactgtcaggtgtgggatagtagtggtgatcattatgtcttcggaactgggaccaaggtcaccgtcctag

SEQ ID NO: 7618 - DNA, 322 bp, Homo sapiens
gaaatagtgatgacgcagtctccagccaccctgtctgtgtctccaggggaagaagccaccctctcctgcagggccagtcagagtattaggagcaacttagcctggtaccagcagaaacctggccaggctcccaggctcctcatctatggtgcattcaccagggccactggtatcccagtcaggttcagtggcagtgggtctgggacagagttcactctcaccatcagaagcctgcagtctgaggattttgcagtttattactgtcagcagtataatgattggcctcggacgttcggccaagggaccaaggtggaaatcaaac

SEQ ID NO: 7619 - DNA, 343 bp, Homo sapiens
gacatcgtgatgacccagtctccagactccctggctgtgtctctgggcgagagggccaccatcagctgcaagtccagccagagccttttctacagctccaacaataaaaactacttagcttggtaccagcagaaaccagggcagcctcctaacctcctaatttactgggcatctacccgggaatccggggtccctgaccgattcagtggcagcgggtctgggacagatttcactctcaccatcagcagcctgcaggctgaagatgtggcaatttattactgtcagcaatattatagtgctctcccgtacacttttggccaggggaccaagctggagataaaac

SEQ ID NO: 7620 - DNA, 322 bp, Homo sapiens; identical to SEQ ID NO: 837

SEQ ID NO: 7621 - DNA, 331 bp, Homo sapiens
cagtctgccctgactcagcctccctccgcgtccgggtctcctggacagtcagtcaccatctcctgcactggaaccagcagtgacgttggtggttataactatgtctcctggtaccaacagcacccaggcaaagcccccaaactcatgatttttgaggtcagtcagcggccctcaggggtccctgatcgcttctctggctccaagtctggcaacacggcctccctgaccgtctctgggctccaggctgaggatgaggctgattattactgcagctcgtatgcaggcagcaacaatttggtgttcggcggagggaccaagctgaccgtcctag

SEQ ID NO: 7622 - DNA, 317 bp, Homo sapiens
gaaattgtgttgacacagtctccagccaccctgtctttgtctccaggggaaagagccaccctctcctgcagggccagtcagagtgttagcagctacttagcctggtaccaacagaaacctggccaggctcccaggctcctcatctatgatgcatccaacagggccactggcatcccagccaggttcagtggcagtgggtctgggacagacttcactctcaccatcagcagcctagagcctgaagattttgcagtttattactgtcagcagcgtagcaactctcactttcggcggagggaccaaggtggagatcaaac

SEQ ID NO: 7623 - DNA, 325 bp, Homo sapiens
tcctatgtgctgactcagccaccctcagtgtcagtggccccaggaaagacggccaggattacctgtgggggaaacaacattggaagtaaaactgtgcactggtaccagcagaagccaggccaggcccctgtgctggtcatctattctgatagcgaccggccctcagggatccctgagcgattcactggctccaactctgggaacacggccaccctgaccatcagcagggtcgaggccggggatgaggccgactattattgtcaggtgtgggatagtagtagtgatcatgtggtattcggcggagggaccaagctgaccgtcctag

SEQ ID NO: 7624 - DNA, 331 bp, Homo sapiens
gaaattgtgttgacgcagtctccaggcaccctgtctttgtctccaggggaaagagccaccctctcctgcagggccagtcagagtgttagcagcagctacttagcctggtaccagcagaaacctggccaggctcccaggctcctcatctatggtgtatccagcagggccactggcatcccagacaggttcagtggcagtgggtctgggactgggacagacttcattctcaccatcagcagactggagcctgaagattttgcagtgtattactgtcagcagtatggtagctcaccgctcactttcggcggagggaccaaggtggagatcaaac

SEQ ID NO: 7625 - DNA, 325 bp, Homo sapiens
tcttctgagctgactcaggaccctgctgtgtctgtggccttgggacagacagtcaggatcacatgccaaggagacagcctcagaaccttttatacaagctggtaccagcagaagccaggacaggcccctgtatttgtcatctatggtaataacaaccggccctcagggatcccagtccgattctctggctccagctcaggaaacacagcttccttgaccatcactggggctcaggcggaagatgaggctgactattactgtaactcccgggacagcagtggtaaccatgtggtattcggcggagggaccaagctgaccgtcctag

SEQ ID NO: 7626 - DNA, 323 bp, Homo sapiens
gaaattgtgttgacgcagtctccaggcaccctgtctttgtctccaggggaaagagccaccctctcctgcagggccagtcagagtgttagcagcagctacttagcctggtaccagcagaaacctggccaggctcccaggctcctcatctatggtgcatccagcagggccactggcatcccagacaggttcagtggcagtgggtctgggacagacttcactctcaccatcagcagactggagcctgaagattttgcagtgtattactgtcagcagtatggtagctcacctgagtttcggcggagggaccaaggtggagatcaaac

SEQ ID NO: 7627 - DNA, 322 bp, Homo sapiens; identical to SEQ ID NO: 837

SEQ ID NO: 7628 - DNA, 325 bp, Homo sapiens
tcctatgtgctgactcagccaccctcggtgtcagtggccccaggacagacggccaggctttcctgtgggggaatcgaccttggaagtaaaaatgtgcactggtaccagcagaagccaggccaggcccctgtgctggtcgtctatgatgatagcgaccggccctcagggatccctgagcgattctctggctccaactctgggaacacggccaccctgaccatcagcagggtcgaagccggggatgaggccgactattactgtcaggtgtgggatagtagtcgtgaccacgtggtattcggcggagggaccaagctgaccgtcctag

SEQ ID NO: 7629 - DNA, 322 bp, Homo sapiens
gaaatagtgatgacgcagtctccagccaccctgtctgtgtctccaggggaaagagccaccctctcctgcagggccagtcagagtgttggcagcaacttagcctggtaccagcagaaacctggccaggctcccaggctcctcatctatggtgcatccaccagggccactggtatcccagccaggttcagtggcagtgggtctgggacagagttcactctcaccatcagcagcctgcagtctgaagattttgcagtttattactgtcagcagtataataactggccgtccacttttggccaggggaccaagctggagatcaaac

SEQ ID NO: 7630 - DNA, 319 bp, Homo sapiens
tcctatgagctgacacagccaccctcggtgtcagtgtccccaggacagacggccaggatcacctgctctggagatgcattgccaaaccaatatgctttttggtaccagcagaagccaggccaggcccctgtgctggtgatatatagagacagtgagaggccctcagggatccctgagcgattctctggctccagctcagggacaacagtcacgttgaccatcagtggagtccaggcagaagatgaggctgactattactgtcaatcagcagacagccgtggtacttcattcggcggagggaccaagctgaccgtcctag

SEQ ID NO: 7631 - DNA, 325 bp, Homo sapiens
tcctatgagctgactcagccaccctcagtgtccgtgtccccaggacagacagccagcatcacctgctctggagataaattgggggataaatatgcttgctggtatcagcagaagccaggccagtcccctgtgctggtcatctatcaagatagcaagcggccctcagggatccctgagcgattctctggctccaactctgggaacacagccactctgaccatcagcgggacccaggctatggatgaggctgactattactgtcaggcgtgggacagcagcactgcctattatgtcttcggaactgggaccaaggtcaccgtcctag

SEQ ID NO: 7632 - DNA, 325 bp, Homo sapiens
gacatccagatgacccagtctccatcctccctgtctgcatctgtaggagacagagtcaccatcacttgccgggcaagtcagagcattagcagctatttaaattggtatcagcagaaaccagggaaagcccctaagctcctgatctatgctgcatccaatttgcaaagtggggtcccatcaaggttcagtggcagtggatctgggacagatttcactctcaccatcagcagtctgcaacctgaagattttgcgacttactactgtcaacagagttacaatacccctccgtggacgttcggccaagggaccaaggtggaaatcaaac

SEQ ID NO: 7633 - DNA, 316 bp, Homo sapiens
gtgatgacgcagtctccggccaccctgtctgtgtctccaggggaaagagccaccctctcctgcagggccagtcagagtcttagcagcaacttagcctggtaccagcagaaacctggccaggctcccaggctcctcatctatggtgcatccaccagggccactggtatcccagccaggttcagtggcagtgggtctgggactgagttcactctcaccatcagcagcctgcagtctgaagattttgcagtttattactgtcagcagtatattcactggcctaggacgttcggccaagggaccaaggtggaaatcaaac

SEQ ID NO: 7634 - DNA, 331 bp, Homo sapiens
cagtctgtgctgactcagccaccctcagcgtctgggacccccgggcagagggtcaccatctcttgttctggaagcagctccaacatcggaagtcatactgtaaactggtaccagcagctcccaggaacggcccccaaactcctcatctatagtaataatcagcggccctcaggggtccctgaccgattctctggctccaagtctggcacctcagcctccctggccatcactgggctccagtctgaggatgaggctgattattactgtgcagcatgggatgacagcctgaatggtcctgtcttcggaactgggaccaaggtcaccgtcctag

SEQ ID NO: 7635 - DNA, 322 bp, Homo sapiens; identical to SEQ ID NO: 4807

SEQ ID NO: 7636 - DNA, 334 bp, Homo sapiens
cagcttgtgctgactcaatcgccctctgcctctgcctccctgggagcctcggtcaagctcacctgcactctgagcagtgggcacagcagctacgccatcgcatggcatcagcagcagccagagaagggccctcggtacttgatgaagcttaacagtgatggcagccacagcaagggggacgggatccctgatcggttcacagtctccagctctggggctgagcgctacctcaccatctccagcctccagtctgaggatgaggctgactattactgtcagacctggggcactggcattcgggtgttcggcggagggaccaagctgaccgtcctag

SEQ ID NO: 7637 - DNA, 322 bp, Homo sapiens
gacatccagatgacccagtctccatcctccctgtctgcatctgtaggagacagagtcgccatcacttgccaggcgagtcagaacattaccaactatttaaattggtatcagcagaagccagggaaagcccctaacctcctgatctacgatgcctccaatttggaaacaggggtcccgtcaaggttcagtggaagtggatctgggacagattttactttcaccatcagcagcctgcagcctgaagatattgcaacatattactgtcaacagtatgataatctccctctcactttcggcggagggaccaagttggagatcaaac

SEQ ID NO: 7638 - DNA, 325 bp, Homo sapiens; identical to SEQ ID NO: 2568

SEQ ID NO: 7639 - DNA, 322 bp, Homo sapiens
gaaatagtgatgacgcagtctccagccaccctgtctgtgtctccaggggaaagagccaccctctcctgcagggccagtcagagtgttagcagcaacttagcctggtaccagcagaaacctggccaggctcccaggctcctcatctatggtgcatccaccagggccactggtatcccagccaggttcagtggcagtgggtctgggacagagttcactctcaccatcagcagcctgcagtctgaagattttgcagtttattactgtcagcagtataataactggctattcactttcggccctgggaccaaagtggatatcaaac

SEQ ID NO: 7640 - DNA, 331 bp, Homo sapiens
cagtctgccctgactcagcctcgctcagtgtccgggtctcctggacagtcagtcaccatctcctgcactggaaccagcagtgatgttggtggttataactatgtctcctggtaccaacagcacccaggcaaagcccccaaactcatgatttatgatgtcagtaagcggccctcaggggtccctgatcgcttctctggctccaagtctggcaacacggcctccctgaccatctctgggctccaggctgaggatgaggctgattattactgctgctcatatgcaggcagctactcttatgtcttcggaactgggaccaaggtcaccgtcctag

SEQ ID NO: 7641 - DNA, 331 bp, Homo sapiens; identical to SEQ ID NO: 830

SEQ ID NO: 7642 - DNA, 319 bp, Homo sapiens
tcctatgagctgacacagccaccctcggtgtcagtgtccccaggacagacggccaggatcacctgctctggagatgcattgccaaagcaatatgcttattggtaccagcagaagccaggccaggcccctgtgctggtgatatataaagacagtgagaggccctcagggatccctgagcgattctctggctccagctcagggacaacagtcacgttgaccatcagtggagtccaggcagaagatgaggctgactattactgtcaatcagcagacagcagtggtcgagtcttcggaactgggaccaaggtcaccgtcctag

SEQ ID NO: 7643 - DNA, 337 bp, Homo sapiens
gatattgtgatgactcagtctccactctccctgcccgtcacccctggagagccggcctccatctcctgcaggtctagtcagagcctcctgcatagtaatggatacaactatttggattggtacctgcagaagccagggcagtctccacagctcctgatctatttgggttctaatcgggcctccggggtccctgacaggttcagtggcagtggatcaggcacagattttacactgaaaatcagcagagtggaggctgaggatgttggggtttattactgcatgcaagctctacaaactccgctcactttcggcggagggaccaaggtggagatcaaac

SEQ ID NO: 7644 - DNA, 328 bp, Homo sapiens
gaaattgtgttgacacagtctccagccaccctgtctttgtctccaggggaaagagccaccctctcctgcagggccagtcagagtgttagcagctacttagcctggtaccaacagaaacctggccaggctcccaggctcctcatctatgatgcatccaacagggccactggcatcccagccaggttcagtggcagtgggtctgggacagacttcactctcaccatcagcagcctagagcctgaagattttgcagtttattactgtcagcagcgtagcaactggcctccgaggctcactttcggcggagggaccaaggtggagatcaaac

SEQ ID NO: 7645 - DNA, 329 bp, Homo sapiens
ttttatgctgactcagccccactctgtgtcggagtctccggggaagacggtaaccatctcctgcacccgcagcagtggcagcattgccagcaactatgtgcagtggtaccaacagcgcccgggcagttcccccaccactgtgatctatgacaataaccaaagaccctctggggtccctgatcggttctctgcctccatcgacagctcctccaactctgcctccctctccatctctggactgaagactgaggacgaggctgactactactgtcagtcttatgatagcatcaatgtggtgttcggcggagggaccacgctgaccgtcctag

SEQ ID NO: 7646 - DNA, 340 bp, Homo sapiens
gacatcgtgatgacccagtctccagactccctggctgtgtctctgggcgagagggccaccatcaactgcaagtccagccagagtgttttatacagctccaacaataagaactacttagcttggtaccagcagaaaccaggacagcctcctaagctgctcatttactgggcatctacccgggaatccggggtccctgaccgattcagtggcagcgggtctgggacagatttcactctcaccatcagcagcctgcaggctgaagatgtggcagtttattactgtcagcaatattatagtactcctcccactttcggcggagggaccaaggtggagatcaaac

SEQ ID NO: 7647 - DNA, 324 bp, Homo sapiens
gacatccagatgacccagtctccatcctccctgtctgcatctgtaggagacagagtcaccatcacttgccaggcgagtcaggacattagcaactatttaagttggtttcagcagaaaccagggaaagcccctaagctcctgatctacgatgcatccaatttggaaacaggggtcccatcaaggttcagtggaagtggatctgggacagattttactttcaccttcagcagcctgcagcctgtagatattgcaacatattactgtccacagtatgataatctcccctcctcactttcggcggagggaccaaggtggagatcaaac

SEQ ID NO: 7648 - DNA, 319 bp, Homo sapiens
gacattgtgttgacacagtctccagccatcctgtctttgtctccaggggaaagagccaccctctcctgcagggccagtcagagtgtgaacaactacttagcctggtaccaacagaaacctggccagactcccaggctcgtcatctatgatgcatccaagaggaccactggcatcccagccaggttcagtggcagtgggtctgggacagacttcactctcaccatcagtagcctagagcctgaagattttgcagtttattcctgtcaccagcgtagcacctggccttacacttttggccaggggaccaagctggagatca

SEQ ID NO: 7649 - DNA, 334 bp, Homo sapiens
cagtctgtgctgacgcagccgccctcagtgtctggggccccagggcagagggtcaccatctcctgcactgggagcagctccaacatcggggcaggttatgatgtacactggtaccagcagcttccaggaacagcccccaaactcctcatccatggtaacagcaatcggccctcaggggtccctgaccgattctctggctccaagtctggcacctcagcctccctggccatcactgggctccaggctgaggatgaggctgattattactgccagtcctatgacagcagcctgagtggttcggtattcggcggagggaccaagctgaccgtcctag

SEQ ID NO: 7650 - DNA, 322 bp, Homo sapiens
gacatccagatgacccagtctccatcctcactgtctgcatctgtaggagacagagtcaccatcacttgtcgggcgagtcagggtattagcagctggttagcctggtatcagcagaaaccagagaaagcccctaagtccctgatctatgctgcatccagtttgcaaagtggggtcccatcaaggttcagcggcagtggatctgggacagatttcactctcaccatcagcagcctgcagcctgaagattttgcaacttattactgccaacagtataatagttaccctcccactttcggcggagggaccaaggtggagatcaaac

SEQ ID NO: 7651 - DNA, 319 bp, Homo sapiens
tcctatgagctgactcagccaccctcagtgtccgtgtccccaggacagacagccagcatcacctgctctggagataaattgggggataaatatgcttgctggtatcagcagaagccaggccagtcccctgtgctggtcatctatcaagatagcaagcggccctcagggatccctgagcgattctctggctccaactctgggaacacagccactctgaccatcagcgggacccaggctatggatgaggctgactattactgtcaggcgtgggacagcagcacttatgtcttcggaactgggaccaaggtcaccgtcctag

SEQ ID NO: 7652 - DNA, 325 bp, Homo sapiens
gaaattgtgttgacgcagtctccaggcaccctgtctttgtctccaggggaaagagccaccctctcctgcagggccagtcagagtgttagcagcacctacttagcctggtaccagcagaaacctggccaggctccaaggctcctcatctatggtgcatccaacagggccacgggcgtcccagacaggttcagtggcagtgggtctgggacagacttcactctcaccatcagcagactggagcctgaagatttcgcagtgtattactgtcaccagtatggaagctcactgtggacgttcggccaagggaccaaggtggaaatcaaac

SEQ ID NO: 7653 - DNA, 325 bp, Homo sapiens
gaaattgtgttgacacagtctccagccaccctgtccttgtctccaggggaaagagccaccctctcctgcagggccagtcagagtgttagtagctacttagcctggtaccaacagaaacctggccaggctcccaggctcctcatctatgatgcatccaacagggccactggcatcccagccaggttcagtggcagtgggtctgggacagacttcattctcaccatcagcagcctagagcctgaagattttgcagtttattactgtcagctgcgtagcaactggcctccgatcaccttcggccaagggacacgactggagattaaac

SEQ ID NO: 7654 - DNA, 337 bp, Homo sapiens
gatgttgtgatgactcagtctccactctccctgcccgtcacccttggacagccggcctccatctcctgcaggtctagtcaaagcctcgtatacagtgatggaaacacctacttgaattggtttcagcagaggccaggccaatctccaaggcgcctaatttataaggtttctaaccgggactctggggtcccagacagattcagcggcagtgggtcaggcactgatttcacactgaaaatcagcagggtggaggctgaggatgttggggtttattactgcatgcaaggtacacactggcctccggttttcggcggagggaccaaggtggagatcaaac

SEQ ID NO: 7655 - DNA, 322 bp, Homo sapiens
gaaattgtgttgacacagtctccagccaccctgtctttgtctccaggggaaagagccaccctctcctgcagggccagtcagagtgttagcagctacttagcctggtaccaacagaaacctggccaggctcccaggctcctcatctatgatgcatccaacagggccactggcatcccagccaggttcagtggcagtgggtctgggacagacttcactctcaccatcagcagcctagagcctgaagattttgcagtttattactgtcagcagcgtagcaactggccttggacgttcggccaagggaccaaggtggaaatcaaac

SEQ ID NO: 7656 - DNA, 329 bp, Homo sapiens
cagtctgccctgactcagcctcgctcagtgtccgggtctcctggacagtcagtcaccatctcctgcactggaaccagcagtgatgttggtggttataattatgtctcctggtaccaacagcacccaggcaaagcccccaaactcatgatttatgatgtccgtaagcggccctcaggggtccctgatcgcttctctggctccaagtctggcaacacggcctccctgaccatatctgggctccgggctgaggatgaggctgaatattactgctgttcatatgcaggcagttatagttatgtcttcggaattgggaccgaggtcaccgtcct

SEQ ID NO: 7657 - DNA, 319 bp, Homo sapiens
gaaatagtgatgacgcagtctccagtcaccctgtctgtgtctccaggggaaagagccaccctctcctgcagggccagtcagagtgttagcagcaacttagcctggtaccagcagaaagctggccaggctcccaggctcctcatctatggtgcatccaccagggccactggtatcccagccaggttcagtggcagtgggtctgggacagagttcactctcaccatcagcagcctgcagtctgaagattttgcagtttattactgtcagcagtataataactggccgacgttcggccaagggaccaaggtggagatcaaac

SEQ ID NO: 7658 - DNA, 331 bp, Homo sapiens
cagtctgtgctgactcagccaccctcagcgtctgggacccccgggcagagggtcaccatctcttgttctggaagcagctccaacatcggaagtaatactgtaaactggtatcagcagctcccaagaacggcccccaaactcgtcatctatactaataatctgcggccctcaggggtccctgaccgattctctggctccaagtctggcacctcagcctccctggccatcagtgggctccagtctgaggatgaggctgattattactgtgcagcatgggattacagcctgaatggttgggtgttcggcggagggaccaagctgaccgtcctag

SEQ ID NO: 7659 - DNA, 322 bp, Homo sapiens
gccatccggatgacccagtctccatcctcattctctgcatctacaggagacagagtcaccatcacttgtcgggcgagtcagggtattagcagttatttagcctggtatcagcaaaaaccagggaaagcccctaagctcctgatctatgctgcatccactttgcaaagtggggtcccatcaaggttcagcggcagtggatctgggacagatttcactctcaccatcagctgcctgcagtctgaagattttgcaacttattactgtcaacagtattatagttacccccacacttttggccaggggaccaagctggagatcaaac

SEQ ID NO: 7660 - DNA, 319 bp, Homo sapiens; identical to SEQ ID NO: 1658

SEQ ID NO: 7661 - DNA, 325 bp, Homo sapiens
gaaatagtgatgacgcagtctccagccaccctgtctgtgtctccaggggaaagagtcaccctctcctgcagggccagtcagagtgttggcagcaacttagcctggtaccagcagaaacctggccaggctcccaggctcctcatctatggtgcatccaccagggccactggtatcccagccaggttcagtggcagtgggtctgggacagagttcactctcaccatcagcagcctgcagtctgaagattttgcagtttattactgtcagcagtataatgactggcctccgtggacttttggccaggggaccaagctggggatcaaac

SEQ ID NO: 7662 - DNA, 328 bp, Homo sapiens
gaaattgtgttgacgcagtctccaggcaccctgtctttgtctccaggggaaagagccaccctctcctgcagggccagtcagagtgttagcagcagctacttagcctggtaccagcagaaacctggccaggctcccaggctcctcatctatggtgcatccagcagggccactggcatcccagacaggttcagtggcagtgggtctgggacagacttcactctcaccatcagcagactggagcctgaagattttgcagtgtattactgtcagcagtatggtagctcacctcggtacacttttggccaggggaccaagctggagatcaaac

SEQ ID NO: 7663 - DNA, 337 bp, Homo sapiens
gatattgtgatgactcagtctccactctccctgcccgtcacccctggagagccggcctccatctcctgcaggtctagtcagagcctcctacatagtaatggatacaactatttggattggtacctgcagaagccagggcagtctccacagctcctgatctatttgggttctaatcgggcctccggggtccctgacaggttcagtggcagtggatcaggcacagattttacactgaaaatcagcagagtggaggctgaggatgttggggtttattactgcatgcaggctctacaaactccgtacacttttggccaggggaccaagctggagatcaaac

SEQ ID NO: 7664 - DNA, 325 bp, Homo sapiens
tcctatgagctgacacagccaccctcggtgtcagtgtccccaggacaaacggccaggatcacctgctctggagatgcattgccaaaaaaatatggttattggtaccagcagaagtcaggccaggcccctgtgctggtcatctatgaggacaacaaacgaccctccgggatccctgagagattctctggctccagctcagggacaatggccaccttgactatcagtggggcccaggtagaggatgaagctgactactactgttactcaacagacagcagtggtaatcagagggtattcggcggagggaccaagctgaccgtcctag

SEQ ID NO: 7665 - DNA, 334 bp, Homo sapiens
cagtctgccctgactcagcctgcctccgtgtctgggtctcctggacagtcgatcaccatctcctgcactggaaccagcagtgacgttggtggttataactatgtctcctggtaccaacaacacccaggcaaagcccccaaactcatgatttatgatgtcagtaatcggccctcaggggtttctaatcgcttctctggctccaagtctggcaacacggcctccctgaccatctctgggctccaggctgaggacgaggctgattattactgcagctcatatacaagcagcagcacccctgtggtattcggcggagggaccaagctgaccgtcctag

SEQ ID NO: 7666 - DNA, 325 bp, Homo sapiens
gaaattgtgttgacgcagtctccaggcaccctgtctttgtctccaggggaaagagccaccctctcctgcagggccagtcagagtgttagcagcagctacttagcctggtaccagcagaaacctggccaggctcccaggctcctcatctatggtgcatccagcagggccactggcatcccagacaggttcagtggcagtgggtctgggacagacttcactctcaccatcagcagactggagcctgaagattttgcagtgtattactgtcagcagtatggtagctcacctaaaacttttggccaggggaccaagctggagatcaaac

SEQ ID NO: 7667 - DNA, 331 bp, Homo sapiens
cagtctgccctgactcagcctgcctccgtgtctgggtctcctggacagtcgatcaccatctcctgcactggaaccagcagtgacgttggtggttataagtatgtctcctggtaccagcaacacccaggcaaagcccccaaactcatgatttatgatgtcagtaatcggccctcaggggtctctaatcgcttctctggctccaagtctggcaacacggcctccctgaccatctctgggctccaggctgaggacgaggctgattattactgcaactcatatacaaggagcagcactctggtattcggcggagggaccaagctgaccgtcctag

SEQ ID NO: 7668 - DNA, 337 bp, Homo sapiens
cagtctgccctgactcagcctcgctcagtgtccgggtctcctggacagtcagtcaccttctcctgcactggaaccagcagtgatgttggtggttataactatgtctcctggtaccaacagcgcccaggcaaagcccccaaactcatgatttatgatgtcactaagcggccctcaggggtccctgatcgcttctctggctccaggtctggcaacacggcctccctgaccatctctgggctccaggctgaggatgaggctgattattactgctgctcatatacaggcggctacactttcgatgtggtattcggcggagggaccaagctgaccgtcctag

SEQ ID NO: 7669 - DNA, 322 bp, Homo sapiens
gacatccaattgacccagtctccatccttcctgtctgcatctgtaggagacagagtcaccatcacttgccgggccagtcagggcattagcagttatttagcctggtatcagcaaaaaccagggaaagcccctaagctcctgatctctgctgcatccactttgcaaagtggggtcccatcaaggttcagcggcagtggatctgggacagaattcactctcacaatcagcagcctgcagcctgaagattttgcaacttattactgtcaacagcttaatagttaccctctcactttcggcggagggaccaaggtggagatcaaac

SEQ ID NO: 7670 - DNA, 322 bp, Homo sapiens
gacatccagatgacccagtctccatcctccctgtctgcatctgtaggagacagagtcaccatcacttgccaggcgagtcaggacattaataagtatttaaattggtatcagcagaaaccagggaaagcccctaacctcctgatctacgatgcatccaatttgggaacaggggtcccatcaaggttcagtggaagtggatctgggacagattttactttcaccatcagcagcctgcagcctgaagatattgcaacatattactgtcaacagtatgataatctcccggtcacattcggcggagggaccaaggtggagatcaaac

SEQ ID NO: 7671 - DNA, 334 bp, Homo sapiens
cagtctgtgctgacgcagccgccctcagtgtctggggccccagggcagagggtcaccatctcctgcactgggagcaactccaacatcggggcaggttatgatgtacactggtaccagcaacttccaggaacagcccccaaactcctcatctatggtaacagcaatcggccctcaggggtccctgaccgattctctggctccaggtctggcacctcagcctccctggccatcactgggctccaggctgaggatgaggctgattattactgccagtcctatgacagcagtctgagtggttcggagttcggcggagggaccaagctgaccgtcctag

SEQ ID NO: 7672 - DNA, 325 bp, Homo sapiens
gacatccagatgacccagtctccatcctccctgtctgcatctgtaggagacagagtcaccgtcacttgccgggcaagtcagagcattaacaactatttaaattggtatcagcagaaaccagggaaagcccctaagctcctgatctatgctgcatccagtttgcaaagtggggtcccatcaaggttcagtggcagtggatctgggacagatttcactctcaccatcagcagtctgcaacctgaagattttgcaatttactactgtcaacagagtttcagtacccctccgtacacttttggccaggggaccaagctggagatcaaac

SEQ ID NO: 7673 - DNA, 322 bp, Homo sapiens
gacatccagttgacccagtctccatccttcctgtctgcatctgtaggagacagagtcaccatcacttgccgggccagtcagggcattagcagttatttagcctggtatcagcaaaaaccagggaaagcccctaagctcctgatctatgctgcatccactttgcaaagtggggtcccatcaaggttcagcggcagtggatctgggacagaattcactctcacaatcagcagcctgcagcctgaagattttgcaacttattactgtcaacagcttaatagttacccttacacttttggccaggggaccaagctggagatcaaac

SEQ ID NO: 7674 - DNA, 340 bp, Homo sapiens
gacatcgtgatgacccagtctccagactccctggctgtgtctctgggcgagagggccaccatcaactgcaagtccagccagagtgttttatacagctccaacaataagaactacttagcttggtaccaacagaaaccaggacagcctcctaacctgctcatttactgggcatctacccgggaatccggggtccctgaccgattcagtggcagcgggtctgggacagatttcactctcaccatcaccagcctgcaggctgaagatgtggcagtttattactgtcagcaattttattctactcccgtgacgttcggccaagggaccaaggtggaaatcaaac

SEQ ID NO: 7675 - DNA, 322 bp, Homo sapiens
gacatccagatgacccagtctccatcctccctgtctgcatctgtaggagacagagtcaccatcacttgccgggcaagtcagggcattagaaatgatttaggctggtatcagcaaaaaccagggaaagcccctcagcgcctgatctatgctgcatccagtttgcaaagtggggtcccatcaaggttcagcggcagtggatctgggacagaattcactctcacaatcagcagcctgcagcctgaagattttgcaacttattactgtctacagcatcatagttaccctcccactttcggcggagggaccaaggtggagatcaaac

SEQ ID NO: 7676 - DNA, 322 bp, Homo sapiens; identical to SEQ ID NO: 3582

SEQ ID NO: 7677 - DNA, 328 bp, Homo sapiens
gaaatagtgatgacgcagtctccagccaccctgtctgtgtctccaggggaaagagccaccctctcctgcagggccagtcagagtgttagcagcaacttagcctggtaccagcagaaacctggccaggctcccaggctcctcatctatggtgcatccaccagggccactggtatcccagccaggttcagtggcagtgggtctgggacagagttcactctcaccatcagcagcctgcagtctgaagattttgcagtttattactgtcagcagtataataactggcctccggagtacacttttggccaggggaccaagctggagatcaaac

SEQ ID NO: 7678 - DNA, 331 bp, Homo sapiens
cagtctgccctgactcagcctgcctccgtgtctgggtctcctggacagtcgatcaccatctcctgcactggaaccagcagtgacgttggtggttataactatgtctcctggtaccaacaacacccaggcaaagcccccaaactcatgatttatgatgtcagtaatcggccctcaggggtttctaatcgcttctctggctccaagtctggcaacacggcctccctgaccatctctgggctccaggctgaggacgaggctgattattactgcagctcatatacaagcagcagcacttgggtgttcggcggagggaccaagctgaccgtcctag

SEQ ID NO: 7679 - DNA, 334 bp, Homo sapiens
cagtctgccctgactcagcctgcctccgtgtctgggtctcctggacagtcgatcaccatctcctgcactggaaccagcagtgacgttggtggttatgactatgtctcctggttccaacaacacccaggcaaagcccccaaactcatggtttatgatgtcagtgatcggccctcaggggtttctaatcgcttctctggctccaagtctggcaacacggcctccctgaccatctctgggctccaggctgaggacgaggctgattattactgcagctcatatacaagcagcagcactttcgtggtattcggcggagggaccaagctgaccgtcctag

SEQ ID NO: 7680 - DNA, 325 bp, Homo sapiens
tcctatgtgctgactcagccaccctcggtgtcagtggccccaggagagacggccagggttacctgtgggggagacaacattgaaagaaacagtgttcactggtaccagctgaagtcaggccaggcccctgtgctggtcgtctatgattatagcgaccggccctcagggatccctgagcgattctctggctccaagtctgggaacacggccaccctgaccatcagcagggtcgaagccggggatgaggccgacttttactgtcaggtgtgggatagtaataatgatcattatgtcttcggaactgggaccaaggtcaccgtcctag

SEQ ID NO: 7681 - DNA, 337 bp, Homo sapiens
gatattgtgatgactcagtctccactctccctgcccgtcacccctggagagccggcctccatctcctgcaggtctagtcagagcctcctgcatagtaatggatacaactatttggattggtacctgcagaagccagggcagtctccacagctcctgatctatttgggttctaatcgggcctccggggtccctgacaggttcagtggcagtggatcaggcacagattttacactgaaaatcagcagagtggaggctgaggatgttggggtttattactgcatgcaagctctacaaactcctccgacgttcggccaagggaccaaggtggaaatcaaac

SEQ ID NO: 7682 - DNA, 325 bp, Homo sapiens
gacatccagatgacccagtctccatcctccctgtctgcatctgtaggagacagagtcaccatcacttgccaggcgagtcaggacattaacaactatttaaattggtatcagcagaaaccagggaaagcccctaaactcctgatctacgatgcatccaatttggaaacaggggtcccatcaaggttcagtggaagtggatctgggacagattttactttcaccatcagcagcctgcagcctgaagatattgcaacatattactgtcaacagtatgataacctccctccaatcaccttcggccaagggacacgactggagattaaac

SEQ ID NO: 7683 - DNA, 331 bp, Homo sapiens
gaaattgtgttgacgcagtctccaggcaccctgtctttgtctccaggggaaagagccaccctctcctgcagggccagtcagagtgttagcagcagctacttagcctggtaccagcagaaacctggccaggctcccaggctcctcatctatggtgcatccagcagggccactggcatcccagacaggttcagtggcagtgggtctgggacagacttcactctcaccatcagcagactggagcctgaagattttgcagtgtattactgtcagcagtatggtagctcacctccaacgtacacttttggccaggggaccaagctggagatcaaac

SEQ ID NO: 7684 - DNA, 325 bp, Homo sapiens
gaaatagtgatgacgcagtctccagccaccctgtctgtgtctccaggggaaagagccaccctctcctgcagggccagtcagagtgttaacagcaacttagcctggtaccagcagaaacctggccaggctcccaggctcctcatctatggtgcatccaccagggccactggtatcccagccaggttcagtggcagtgggtctgggacagagttcactctcaccatcagcagcctgcagtctgaagattttgcagtttattactgtcagcactataataactggcctccttacacttttggccaggggaccaagctggagatcaaac

SEQ ID NO: 7685 - DNA, 328 bp, Homo sapiens
gaaatagtgatgacgcagtctccagccaccctgtctgtgtctccaggggaaagagccaccctctcctgcagggccagtcagagtgttagtagcaacttagcctggtaccagcagaaacctggccaggctcccaggctcctcatctatggtgcatccaccagggccactggtatcccagccaggttcagtggcagtgggtctgggacagagttcactctcaccatcagcagcctgcagtctgaagattttgcagtttattactgtcagcagtataataactggcctccgacgtacacttttggccaggggaccaagctggagatcaaac

SEQ ID NO: 7686 - DNA, 319 bp, Homo sapiens
tcctatgacctgactcagccaccctcagtgtccgtgtccccaggacagacagccagcatcacctgctctggagataaattggggaataaatatgcttgctggtatcagcagaagccaggccagtcccctgtgctggtcatctatcgagatagcaagcggccctcagggatccctgagcgattctctggctccaactctgggaacacagccactctgaccatcagcgggacccagggtatggatgaggctgactattattgtcaggcgtgggacagtagcactgtggtattcggcggagggaccaagctgaccgtcctag

SEQ ID NO: 7687 - DNA, 319 bp, Homo sapiens
tcctatgagctgactcagccaccctcagtgtccgtgtccccaggacagacagccagcatcacctgctctggagataaattggggaataaatatgcttcctggtatcagcagaaggcaggccagtcccctgtgttggtcatctatcaagatgacaagcggccctcagggatccctgagcgattctctggctccaactctgggaacacagccactctgaccatcagcgggacccacgctatggatgaggctgactattactgtcaggcgtggggcagcagcactggggtcttcggaactgggaccaaggtcaccgtcctag

SEQ ID NO: 7688 - DNA, 329 bp, Homo sapiens
cagtctgtgttgacgcagccgccctcagtgtctgcggccccaggacagaaggtcaccatcccctgctccggaagcagctccaacattgaaaataattatgtatcctggtaccagcatatcgcaggaacagcccccaaactcctcatctatgacactcatgcgcgaccgtcagggattcctgaccgattctctggctccaagtctggcacgtcagccaccctgggcatcaccgggctccagactggggacgaggccgagtattactgcggaacatgggataccagcctgaatactgtggtcttcggcggagggaccaggctgaccgtcct

SEQ ID NO: 7689 - DNA, 325 bp, Homo sapiens; identical to SEQ ID NO: 883

SEQ ID NO: 7690 - DNA, 322 bp, Homo sapiens; identical to SEQ ID NO: 855

SEQ ID NO: 7691 - DNA, 328 bp, Homo sapiens; identical to SEQ ID NO: 1028

SEQ ID NO: 7692 - DNA, 322 bp, Homo sapiens; identical to SEQ ID NO: 4807

SEQ ID NO: 7693 - DNA, 325 bp, Homo sapiens
gaaattgtgttgacgcagtctccaggcaccctgtctttgtctccaggggaaagagccaccctctcctgcagggccagtcagagtgttagcagcagctacttagcctggtaccagcagaaacctggccaggctcccaggctcctcatctatggtgcatccagcagggccactggcatcccagacaggttcagtggcagtgggtctgggacagacttcactctcaccatcagcagactggagcctgaagattttgcagtgtattactgtcagcagtatggtagctcacctcccacttttggccaggggaccaagctggagatcaaac

SEQ ID NO: 7694 - DNA, 337 bp, Homo sapiens; identical to SEQ ID NO: 3975

SEQ ID NO: 7695 - DNA, 340 bp, Homo sapiens
gatattgtgatgacccagactccactctccctgcccgtcacccctggagagccggcctccatctcctgcaggtctagtcagagcctcttggatagtgatgatggaaacacctatttggactggtacctgcagaagccagggcagtctccacagctcctgatctatacgctttcctatcgggcctctggagtcccagacaggttcagtggcagtgggtcaggcactgatttcacactgaaaatcagcagggtggaggctgaggatgttggagtttattactgcatgcaacgtatagagtttcctttcactttcggccctgggaccaaagtggatatcaaac

SEQ ID NO: 7696 - DNA, 329 bp, Homo sapiens
cagtctgtgctgactcagccaccctcggtgtctgaagcccccaggcagagggtcaccatctcctgttctggaagcagctccaacatcggaaataatcctgttaactggtaccaccagctcccaggaaaggctcccaaactcctcatctattatgatgatctactgccctcaggggtctctgaccgattctctggctccaagtctggcacctcagcctccctggccatcagtgggctccagtctgaggatgaggctgattattactgtgcatcatgggatgacagcctgaatggtccggtattcggcggagggaccaagctgaccgtcct

SEQ ID NO: 7697 - DNA, 327 bp, Homo sapiens
cagtctgccctgactcagcctgcctccgtgtctgggtctcctggacagtcgatcaccatctccagcactggaaccagtagtgacgttggtggttataactatgtctcctggtaccaacgccacccaggcaaagcccccaaactcctcatttatgatgtcactaatcggccctcaggggtttctaatcgcttctctggctccaagtctggcaacacggcctccctgaccatctctgggctccaggctgaggacgaggctgattattactgcggctcatatacaggcagcaacactctttcggcggagggaccaagctgaccgtcctag

SEQ ID NO: 7698 - DNA, 322 bp, Homo sapiens
gaaatagtgatgacgcagtctccagccaccctgtctgtgtctccaggggaaagagccaccctctcctgcagggccagtcagagtgttcgcagcaacttagcctggtaccaacagaaacctggccaggctcccaggctcctcatctatggtgcatccaccagggccactggtatcccagccaggttcagtgccagtgggtctgggacagagttcactctcaccatcagcagcctgcagtctgaagattttgcagtttatttctgtcagcagtataatgtctggccgtacacttttggccaggggaccaagctggagatcaaac

SEQ ID NO: 7699 - DNA, 337 bp, Homo sapiens
gatattgtgatgacccagactccactctcctcacctgtcacccttggacagccggcctccatctcctgcaggtctagtcaaagcctcgtacacagtgatggaaacacctacttgagttggcttcagcagaggccaggccagcctccaagactcctaatttataagatttctaaccggttctctggggtcccagacagattcagtggcagtggggcagggacagatttcacactgaaaatcagcagggtggaagctgaggatgtcggggtttattactgcatgcaagctacacaattgccttggactttcggccctgggaccaaagtggatatcaaac

SEQ ID NO: 7700 - DNA, 319 bp, Homo sapiens
gaaattgtgctgactcagtctccagactttcagtctgtggctccaaaggagaaagtcaccatcacctgccgggccagtcagaacattggtagtagcttacactggtaccagcagaagccaggtcagtctccaaaactcctcatcaagtatgcttcccagtccttctcaggggtcccctcgagattcagtggcagtggatctgggacagatttcaccctcacaatcaatggcctggaagctgaagatgctgcaacgtattactgtcatcagagtagtagtttgctcactttcggcggagggaccaaggtggagatcaaac

SEQ ID NO: 7701 - DNA, 322 bp, Homo sapiens; identical to SEQ ID NO: 837

SEQ ID NO: 7702 - DNA, 325 bp, Homo sapiens
gaaattgtgttgacacagtctccagccaccctgtctttgtctccaggggaaagagccaccctctcctgcagggccagtcagagtgttagcagctacttagcctggtaccaacagaaacctggccaggctcccaggctcctcatctatgatgcatccaacagggccactggcatcccagccaggttcagtggcagtgggtctgggacagacttcactctcaccatcagcagcctagagcctgaagattttgcagtttattactgtcagcagcgtaccaactggcctccgatcaccttcggccaagggacacgactggagattaaac

SEQ ID NO: 7703 - DNA, 325 bp, Homo sapiens
gaaattgtgttgacgcagtctccaggcaccctgtctttgtctccaggggaaagagccaccctctcctgcagggccagtcagagtgttagcagcagctacttagcctggtaccagcagaaacctggccaggctcccaggctcctcatctatggtgcatccagcagggccactggcatcccagacaggttcagtggcagtgggtctgggacagacttcactctcaccatcagcagactggagcctgaagattttgcagtgtattactgtcagcagtatggtagctcaccgaagactttcggccctgggaccaaagtggatatcaaac

SEQ ID NO: 7704 - DNA, 322 bp, Homo sapiens
gacatccagatgacccagtctccttccaccctgtctgcatctgtaggagacagagtcaccatcacttgccgggccagtcacagtattagtagctggttggcctggtatcagcagaaaccagggaaagcccctaagctcctgatctataaggcgtctagtttaaaaagtggggtcccatcaaggttcagcggcagtggatctgggacagaattcactctcaccatcagcagcctgcagcctgatgattttgcaacttattactgccaacagtataatacttattctcaaacttttggccaggggaccaagctggagatcaaac

SEQ ID NO: 7705 - DNA, 331 bp, Homo sapiens
cagtctgccctgactcagcctgcctccgtgtctgggtctcctggacagtcgatcaccatctcctgcactggaaccagcagtgacgttggtgttttttactctgtctcctggtaccaacaacacccaggcaaagcccccaaactcatgatttatgatgtcagtaatcggccctcaggggtttctaatcgcttctctggctccaagtctggcaagacggcctccctgaccatctctgggctccaggctgaggacgaggctgattattactgcagctcatatacaagcaggagcacttttgtcttcggtactgtgaccaaggtcaccgtcctag

SEQ ID NO: 7706 - DNA, 316 bp, Homo sapiens
gaaattgtgttgacacagtctccagccaccctgtctttgtctccaggggaaagagccaccctctcctgcagggccagtcagggtgttagcagctacttagcctggtaccagcagaaacctggccaggctcccaggctcctcatctatgatgcatccaacagggccactggcatcccagccaggttcagtggcagtgggcctgggacagacttcactctcaccatcagcagcctagagcctgaagattttgcagtttattactgtcagcagcgtagcaactggcatttcggcggagggaccaaggtggagatcaaac

SEQ ID NO: 7707 - DNA, 322 bp, Homo sapiens; identical to SEQ ID NO: 4554

SEQ ID NO: 7708 - DNA, 325 bp, Homo sapiens
gacatccagatgacccagtctccttccaccctgtctgcatctgtaggagacagagtcaccatcacttgccgggccagtcagagtattagtagctggttggcctggtatcagcagaaaccagggaaagcccctaagctcctgatctataaggcgtctagtttagaaagtggggtcccatcaaggttcagcggcagtggatctgggacagaattcactctcaccatcagcagcctgcagcctgatgattttgcaacttattactgccaacagtataatagttattcggggtacacttttggccaggggaccaagctggagatcaaac

SEQ ID NO: 7709 - DNA, 331 bp, Homo sapiens
cagtctgtgctgactcagccaccctcagcgtctgggacccccgggcagagggtcaccatctcttgttctggaagcagctccaacatcggaagtaagactgtaaactggtaccagcagctcccaggaacggcccccaaactcctcatctatagtaataatcagcggccctcaggggtccctgaccgattctctggctccaagtctggcacctcagcctccctggccatcagtgggctccagtctgaggatgaggctgattattactgtgcagcatgggatgacagcctgaatggtccggtgttcggcggagggaccaagctgaccgtcctag

SEQ ID NO: 7710 - DNA, 334 bp, Homo sapiens
cagtctgtgctgacgcagccgccctcagtgtctggggccccagggcagagggtcaccatctcctgcactgggagcaactccaacatcggggcaggttatgatgtacattggtaccagcagcttccaggaacagcccccaaactcctcatctatggtaccagcaatcggccctcaggggtccctgcccgattctctggctccaagtctggcacctcagcctccctggccatcactgggctccaggctgaggatgaggctgattattactgccagtcctatgacagcagactgagtgattccgtattcggcggagggaccaagctgaccgtcctag

SEQ ID NO: 7711 - DNA, 319 bp, Homo sapiens
tcctatgagctgactcagccaccctcagtgtccgtgtccccaggacagacagccagcatcacctgctctggagataaattgggggataaatttgcttgctggtatcagcagaaggcaggccagtcccctgtgctggtcatctatcaagataccaagcggccctcagggatccctgcgcgattctctggctccaactctgggaacacagccactctgaccatcagcgggacccaggctgtggatgaggctgactattactgtcaggcgtggggcagcagcacaggagtattcggcggagggaccaagctgaccgtcctag

SEQ ID NO: 7712 - DNA, 340 bp, Homo sapiens
gatattgtgatgactcagtctccactctccctgcccgtcacccctggagagccggcctccatctcctgcaggtctagtcagagcctcctgcatagtaatggatacaactatttggattggtacctgcagaagccagggcagtctccacagctcctgatctatttgggttctaatcgggcctccggggtccctgacaggttcagtggcagtggatcaggcacagattttacactgaaaatcagcagagtggaggctgaggatgttggggtttattactgcatgcaatctctacaatctctttcgatcaccttcggccaagggacacgactggcgattaaac

SEQ ID NO: 7713 - DNA, 319 bp, Homo sapiens
tcctatgaggtgactcagccaccctcagtgtccgtgtccccaggacagacagccagcatcacctgctctggacataaattgggggataaatatgcttgctggtatcagcagaagccgggccaatcccctgtgttggtcatctatgaagataaaaagcggccctcagggatccctgagcgattctctggctccaactctgggaacacagccactctgaccatcagcgggacccaggccatggatgaggctgagtattactgtcaggcgtgggacagcagcactgtggtattcggcggagggaccaagctgaccgtcctag

SEQ ID NO: 7714 - DNA, 323 bp, Homo sapiens
tcctatgagctgacacagccaccctcggtgtcagtgtccccaggacaaacggccaggatcacctgctctggagatgcattgccaaaaaaatatgcttattggtaccagcagaagtcaggccaggcccctgtgctggtcatctatgaggacagcaaacgaccctccgggatccctgagagattctctggctccagctcagggacaatggccaccttgactatcagtggggcccaggtggaggatgaagctgactactactgttactcaacagacagcagtggtaatctctgggtcttcggaactgggaccaaggtcaccgtcct

SEQ ID NO: 7715 - DNA, 322 bp, Homo sapiens
gacatccagatgacccagtctccatcctccctgtctgcatctgtaggagacagagtcaccatcacttgccgggcaagtcagagcattagcagctatttaaattggtatcagcagaaaccagggaaagcccctaagctcctgatctatgctgcatccagtttgcaaagtggggtcccatcaaggttcagtggcagtggatctgggacagatttcactctcaccatcagcagtctgcaacctgaagattttgcaacttactactgtcaacagagttacagtacccctggcactttcggcggagggaccaaggtggagatcaaac

SEQ ID NO: 7716 - DNA, 328 bp, Homo sapiens
gaaattgtgttgacacagtctccagccaccctgtctttgtctccaggggaaagagccaccctctcctgcagggccagtcagagtgttagcagctacttagcctggtaccaacagaaacctggccaggctcccaggctcctcatctatgatgcatccaacagggccactggcatcccagccaggttcagtggcagtgggtctgggacagacttcactctcaccatcagcagcctagagcctgaagattttgcagtttattactgtcagcagcgtagcaactggcctcccccgtacacttttggccaggggaccaagctggagatcaaac

SEQ ID NO: 7717 - DNA, 322 bp, Homo sapiens
gacatccagttgacccagtctccatccttcctgtctgcatctgtaggagacagagtcaccatcacttgccgggccagtcagggcattagcagttatttagcctggtatcagcaaaaaccagggaaagcccctaagctcctgatctatgctgcatccactttgcaaagtggggtcccatcaaggttcagcggcagtggatctgggacagagttcactctcacaatcagcagcctgcagcctgaagattttgcaacttattactgtcaacagcttaatagttacctctacacttttggccaggggaccaagctggagatcaaac

SEQ ID NO: 7718 - DNA, 325 bp, Homo sapiens
tcttctgagctgactcaggaccctgctgtgtctgtggccttgggacagacagtcaggatcacatgccaaggagacagcctcagaagctattatgcaagctggtaccagcagaagccaggacaggcccctgtacttgtcatctatggtaaaaacaaccggccctcagggatcccagaccgattctctggctccagctcaggaaacacagcttccttgaccatcactggggctcaggcggaagatgaggctgactattactgtaactcccgggacagcagtggtaaccatctggtattcggcggagggaccaagctgaccgtcctag

SEQ ID NO: 7719 - DNA, 331 bp, Homo sapiens
cagtctgtgttgactcagccaccctcagcgtctgggacccccgggcagagggtcaccatctcttgttctggaagcagctccaacatcggaagtaattatgtatactggtaccagcagctcccaggaacggcccccaaactcctcatctataggaataatcagcggccctcaggggtccctgaccgattctctggctccaagtctggcacctcagcctccctggccatcagtgggctccggtccgaggatgaggctgattattactgtgcagcatgggatgacagcctgagtggtccggtgttcggcggagggaccaagctgaccgtcctag

SEQ ID NO: 7720 - DNA, 322 bp, Homo sapiens
gacatccagatgacccagtctccatcctccctgtctgcatctgtaggagacagagtcaccatcacttgccgggcaagtcagagcattagcagctatttaaattggtatcagcagaaaccagggaaagcccctaagctcctgatctatgctgcatccagtttgcaaagtggggtcccatcaaggttcagtggcagtggatctgggacagatttcactctcaccatcagcagtctgcaacctgaagattttgcaacttactactgtcaacagagttacagtacccccaacacttttggccaggggaccaagctggagatcaaac

SEQ ID NO: 7721 - DNA, 335 bp, Homo sapiens
cagtctgccctgactcagcctccctccgcgtccgggtctcctggacagtcagtcaccatctcctgcactggacccagcagtgacgttggtggttataactttgtctcctggtaccaacagcacccaggcaaagcccccaaactcatgatttatgaggtcagtaagcggccctcaggggtccctgatcgcttctctggctccaagtctggcaacacggcctccctgaccgtctctgggctccaggctgaggatgaggctgattattactgcagctcatatgcaggcagcaacaatttcggggggtcttcggaactgggaccaaggtcaccgtccta

SEQ ID NO: 7722 - DNA, 331 bp, Homo sapiens
caggctgtggtgactcaggagccctcactgactgtgtccccaggagggacagtcactctcacctgtggctccagcactggaactgtcaccagtggtcattatccctactggctccagcagaagcctggccaagcccccaggacactgatttatgatacaaaggacaaacacccctggacacctgcccggttttcaggctccctccttggggacaaagctgccctgaccctttcgggtgcgcagcctgacgatgaggctgactattactgcttgctctcctatggtggtagtcggccggtgttcggcggagggaccaagctgaccgtcctag

SEQ ID NO: 7723 - DNA, 322 bp, Homo sapiens
gacatccagatgacccagtctccttccaccctgtctgcatctgtaggagacagagtcaccatcacttgccgggccagtcagagtattagtagctggttggcctggtatcagcagaaaccagggaaagcccctaagctcctgatctataaggcgtctagtttagaaagtggggtcccatcaaggttcagcggcagtgaatctgggacagaattcactctcaccatcagcagcctgcagcctgatgattttgcaacttattactgccaacagtataatagttatccgtacacttttggccaggggaccaagctggagatcaaac

SEQ ID NO: 7724 - DNA, 322 bp, Homo sapiens
gaaatagtgatgacgcagtctccagccaccctgtctgtgtctccaggggaaagagccaccctctcctgcagggccagtcagagtgttagcagcaacttagcctggtaccagcagaaacctggccaggctcccaggctcctcatctatggtgcatccaccagggccactggcatcccagccaggttcagtggcagtgggtctgggacagagttcactctcaccatcagcagcctgcagtctgaagattttgcagtttattactgtcagcagtataataactggctattcactttcggccctgggaccaaagtggatatcaaac

SEQ ID NO: 7725 - DNA, 325 bp, Homo sapiens
gaaattgtgttgacgcagtctccaggcaccctgtctttgtctccaggggaaagagccaccctctcctgcagggccagtcagagtgttagaagcagcgacttagcctggtaccagcagaaacctggccaggctcccaggctcctcatctatgatgcatccagcagggccactggcatctcagacaggctcagtggcagtgggtctgggacagacttcactctcaccatcagcagactggagcctgaagattttgcagtgtattactgtcagcagtatggtagctccccgatcaccttcggccaagggacacgactggagattaaac

SEQ ID NO: 7726 - DNA, 325 bp, Homo sapiens
gatatccagatgacccagtctccttccaccctgtctgcatctgtaggagacagagtcaccatcacttgccgggccagtcagagtattagtatctggttggcctggtatcagcagaaaccagggaaagcccctaagctcctgatctatgaggcgtctagtttagaaagtggggtcccatcaaggttcagcggcagtggatctgggacagtattcactctcaccatcagcagcctgcagcctgatgattttgcaacttattactgccatcactataatagttattctccgtggacgttcggccaagggaccaaggtggaaatcaaac

SEQ ID NO: 7727 - DNA, 322 bp, Homo sapiens
gaaacgacactcacgcagtctccagcattcatgtcagcgactccaggagacaaagtcaacatctcctgcaaagccagccaagacattgatgatgatatgaactggtaccaacagaaaccaggagaagctgctattttcattattcaagaagctactactctcgttcctggaatcccacctcgattcagtggcagcgggtatggaacagattttaccctcacaattaataacatagaatctgaggatgctgcatattacttctgtctacaacatgataatttccctctcactttcggcggagggaccaaggtggagatcaaac

SEQ ID NO: 7728 - DNA, 325 bp, Homo sapiens
gaaatagtgttgacgcagtctccaggcaccctgtccttgtctccaggggacagggccaccctctcctgcaggaccagtcagagtgttaacagcaggtacttagcctggtatcagcagaagcccggccaggcccccaggctcctcatatatggtgcagtcaccagggccaccggcatccctgacagattcagcggcagtgggtctgggacagacttcactctcatcgtcagcaagctggaacttgaagattttgcagtgtattattgtcaacaatatggagggtcaccgtggacgttcggccaagggaccaaggtggaaatcaaac

SEQ ID NO: 7729 - DNA, 322 bp, Homo sapiens; identical to SEQ ID NO: 3870

SEQ ID NO: 7730 - DNA, 321 bp, Homo sapiens
gaaattgtgttgacacagtctccagccaccctgtctttgtctccaggggaaagagccaccctctcctgcagggccagtcagagtgttagcagctacttagcctggtaccaacagaaacctggccaggctcccaggctcctcatctatgatgcatccaacagggccactggcatcccagccaggttcagtggcagtgggtctgggacagacttcactctcaccatcagcagcctagagcctgaagattttgcagtttattactgtcagcagcgtagcaactggggggggctttcggccctgggaccaaagtggatatcaaac

SEQ ID NO: 7731 - DNA, 322 bp, Homo sapiens
tcttctgagctgactcaggaccctgctgtgtctgtggccttgggacagacagtcaggatcacatgccaaggagacagcctcagaagctattatgcaagctggtaccagcagaagccaggacaggcccctgtacttgtcatctatggtaaaaacaaccggccctcagggatcccagaccgattctctggctccagctcaggaaacacagcttccttgaccatcactggggctcaggcggaagatgaggctgactattactgtaactcccgggacagcagtggtcttgtggtattcggcggagggaccaagctgaccgtcctag

SEQ ID NO: 7732 - DNA, 322 bp, Homo sapiens; identical to SEQ ID NO: 837

SEQ ID NO: 7733 - DNA, 322 bp, Homo sapiens
gccatccggatgacccagtctccatcctcattctctgcatctacaggagacagagtcaccatcacttgtcgggcgagtcagggtattagcagttatttagcctggtatcagcaaaaaccagggaaagcccctaagctcctgatctatgctgcatccactttgcaaagtggggtcccatcaaggttcagcggcagtggatctgggacagatttcactctcaccatcagctgcctgcagtctgaagattttgcaacttattactgtcaacagtattatagttacccttggacgttcggccaagggaccaaggtggaaatcaaac

SEQ ID NO: 7734 - DNA, 322 bp, Homo sapiens; identical to SEQ ID NO: 3984

SEQ ID NO: 7735 - DNA, 316 bp, Homo sapiens
tcctatgagctgactcagccaccctcagtgtccgtgtccccaggacagacagccagcatcacctgctctggagataaattgggggataaatatgcttactggtatcagcagaagccaggccagtcccctgtgttggtcatgtatcaagatagaaagcggccctcagggatccctgagcgattgtctggctccaactctgggaacacagccactctgaccatcagcgggacccaggctatggatgaggctgactattactgtcaggcgtgggacagcatcgtggtattcggcggagggaccaagctgaccgtcctag

SEQ ID NO: 7736 - DNA, 322 bp, Homo sapiens
tcctatgagctgacacagccatcctcagtgtcagtgtctccgggacagacagccaggatcacctgctcaggagatgtcttggcaaaaaaatatgcttggtggttccagcagaagccaggccaggcccctgtgttggtgatttataaagacaatgagcggccctcagggatccctgagcgattctccggctccagctcagggaccacagtcaccttgaccatcaccggggcccggcttgaggatgaggctgactattactgttattctgcggctgacaacaatctaggagtgttcggcggagggaccaagctgaccgtcctag

SEQ ID NO: 7737 - DNA, 340 bp, Homo sapiens
gacatcgtgatgacccagtctccagactccctggctgtgtctctgggcgagagggccaccatcaactgcaagtccagccagagtgttttatacagctccgacaataagaactacttagcttggttccagcagacaccaggacagcctcctaaactgctcatttactgggcatctacccgggaatccggggtccctgaccgattcagtggcagcgggtctgggacagatttcactctcaccatcagcagcctgcaggctgaagatgtggcagtttattactgtcagcaatattatagtcctcctgtcacttttggccaggggaccaagctggagatcaaac

SEQ ID NO: 7738 - DNA, 337 bp, Homo sapiens
cagtctgtgctgacgcagccgccctcagtgtctggggccccagggcagagggtcaccatctcctgcactgggagcagctccaacatcggggcaggttatgatgtacactggtatcagcagcttccaggaacagcccccaaactcctcatctatggtaacagcaatcggccctcaggggtccctgaccgattctctggctccaagtctggcacctcagcctccctggccatcactgggctccaggctgaggatgaggctgattattactgccagtcctatgacatcagcctgagtggtcctgtggtattcggcggagggaccaagctgaccgtcctag

SEQ ID NO: 7739 - DNA, 322 bp, Homo sapiens
gccatccggatgacccagtctccatcttcagtctctgcatctgcaggagacagagtcaccatcacttgtcgggcgagtcagggtgtcagtacttatttagcctggtatcagcaaagaccagggaaagcccctaaactcctgatctatggtgcatccactttgcaaagtggggtcccatcaaggttcagcggccgtgcatctgggacagatttctctctcaccatcagctacctgcagtctgaagattttgcgacttattattgtcaacaatattatatgtaccctctcaccttcggcggggggaccaaggtggagatgaaac

SEQ ID NO: 7740 - DNA, 325 bp, Homo sapiens
gatattgtgttgacgcagtctccaggcaccctgtctttgtctccaggggaaagagccaccctctcctgcagggccagtcagagtgttagcagcaggtccttagcctggtaccagcagaaacctggccaggctcccaggctcctcatctatggtgcatccagcagggccactgacatcccagacaggttcagtggcagtgggtctgggacagacttcactctcaccatcagcagactggagcctgaagattttgcagtgtattactgtcagcagtatggtagctcacaggggacgttcggccaagggaccaaggtggaaatcaaac

SEQ ID NO: 7741 - DNA, 322 bp, Homo sapiens
gaaatagtgatgacgcagtctccagccaccctgtctgtgtctccaggggaaagagccaccctctcctgcagggccagtcagagtgttagcagcaacttagcctggtaccagcagaaacctggccaggctcccaggctcctcatctatggtgcatccaccagggccactggtatcccagccaggttcagtggcagtgggtctgggacagagttcactctcaccatcagcagcctgcagtctgaagattttgcagtttattactgtcagcagtataataactggccccggacgttcggccaagggaccaaggtggaaatcaaac

SEQ ID NO: 7742 - DNA, 322 bp, Homo sapiens
gacatccagatgacccagtctccatcctccctgtctgcatctgtaggagacagagtcaccatcacttgccgggcaagtcagagcattagcagctatttaaattggtatcagcagaaaccagggaaagcccctaagctcctgatctatgctgcatccagtttgcaaagtggggtcccatcaaggttcagtggcagtggatctgggacagatttcactctcaccatcagcagtctgcaacctgaagattttgcaacttactactgtcaacagagttacagtaccttgtggacgttcggccaagggaccaaggtggaaatcaaac

SEQ ID NO: 7743 - DNA, 322 bp, Homo sapiens
gacatccagatgacccagtctccttccaccctgtctgcatctgtaggagacagagtcaccatcacttgccgggccagtcagagtattagtagctggttggcctggtatcagcagaaaccagggaaagcccctaagctcctgatctataaggcgtctagtttagaaagtggggtcccatcaaggttcagcggcagtggatctgggacagaattcactctcaccatcagcagcctgcagcctgatgattttgcaacttattactgccaacagtataatagttattctaggacgttcggccaagggaccaaggtggaaatcaaac

SEQ ID NO: 7744 - DNA, 325 bp, Homo sapiens; identical to SEQ ID NO: 3438

SEQ ID NO: 7745 - DNA, 325 bp, Homo sapiens
gacatccagatgacccagtctccatcctccctgtctgcatctgtgggagacagagtcaccatcacttgccgggcaagtcagagcattagcaggtatttaaattggtatcagcagagaccagggagagcccctaggttcctgatctatgctgcatccactttgcatagtggggtcccatcaagattcagtggcagtggatctgggacagatttcactctcaccatcagtagtctgcagcctgaagattttgcaacttactactgtcaacagagttacagtagccctccgtggacgttcggcccagggaccaaggtggaaatcaaac

SEQ ID NO: 7746 - DNA, 337 bp, Homo sapiens
cagtctgccctgactcagcctgcctccgtgtctgggtctcctggacagtcgatcaccatctcctgcactggaaccagcagtgatgttgagacttataaccttgtctcctggtaccaacagcacccaggcaaagcccccaaactcatgatttatgacgtcagtaagcggccctcaggggtttctaatcgcttctctggctccaagtttgccaacacggcctccctgacaatctctgggctccaggctgaggacgaggctgattattactgctgttcatatgcaggtagtaccacttttccttatgtcttcggaactgggaccaaggtcaccgtcctag

SEQ ID NO: 7747 - DNA, 331 bp, Homo sapiens
cagtctgccctgactcagcctgcctccgtgtctgggtctcctggacagtcgatcaccatctcctgcactggaaccagcagtgacgttggtggttataactatgtctcctggtaccaacaacacccaggcaaagcccccaaactcatgatttatgatgtcagtaatcggccctcaggggtttctaatcgcttctctggctccaagtctggcaacacggcctccctgaccatctctgggctccaggctgaggacgaggctgattattactgcagctcatatacaagcagcagcactctggtgttcggcggagggaccaagctgaccgtcctag

SEQ ID NO: 7748 - DNA, 325 bp, Homo sapiens
tcctatgagctgacacagccaccctcggtgtcagtgtccccaggacaaacggccaggatcacctgctctggagatgcattgccaaaaaaatatgcttattggtaccagcagaagtcaggccaggcccctgtgctggtcatctatgaggacaaccaacgaccctccgggatccctgagagattctctggctccagctcagggacaatggccaccttgactatcagtggggcccaggtggaggatgaagctgactactactgttactcaacagacagcagtggtaaccaaggggtgttcggcggagggaccaagctgaccgtcctag

SEQ ID NO: 7749 - DNA, 331 bp, Homo sapiens; identical to SEQ ID NO: 5156

SEQ ID NO: 7750 - DNA, 337 bp, Homo sapiens
gaaattgtgatgactcagtctccactctccctgcccgtcacccctggagagccggcctccatctcctgcaggtctagtcagagcctcctgcataggaatggatacaactatttggattggtacctgcagaagccagggcagtctccacagctcctgatctatttgggttctaatcgggcctccggggtccctgacaggttcagtggcagtggatcaggcacagattttacactgaaaatcagcagagtggaggctgaggatgttggggtttattactgcatggaagctctacaaactcctctcactttcggcggagggaccaaggtggagatcaaac

SEQ ID NO: 7751 - DNA, 334 bp, Homo sapiens
cagtctgccctgactcagcctgcctccgtgtctgggtctcctggacagtcgatcaccatctcctgcactggaaccggcagtgacgttggtggttataactctgtctcctggtaccaacaacacccaggcaaagcccccaaactcatgatttatgatgtcagtaatcggccctcagggatttctaaacgcttctctgcctccaagtctggcaacacggcctccctgaccatctctgggctccaggctgaggacgaggctgattattactgcagctcatatacaagcagcatcaccccttatgtcttcggaactgggaccaaggtcaccgtcctag

SEQ ID NO: 7752 - DNA, 334 bp, Homo sapiens
cagtctgccctgactcagcctccctccgcgtccgggtctcctggacagtcagtcaccatctcctgcactggaaccagcagtgacgttggtggttataactatgtctcctggtaccaacagcacccaggcaaagcccccaagctcatgatttatgaggtcactaagcggtcctcaggggtccctgatcgcttctctggctccaagtctggcaacacggcctccctgaccgtctctgggctccaggctgaggatgaggctaattattactgcagctcatatgcaggcagcaacacgcatgtggtattcggcggagggaccaagctgaccgtcctag

SEQ ID NO: 7753 - DNA, 328 bp, Homo sapiens
gaaatagtgatgacgcagtctccagccaccctgtctgtgtctccaggggaaagagccaccctctcctgcagggccagtcagagtcttagcagcaacttagcctggtaccagcagaaacctggccaggctcccaggctcctcatctatggtgcatccaccagggccactggtatcccagccaggttcagtggcagtgggtctgggacagagttcactctcaccatcagcagcctgcagtctgaagattttgcagtttattactgtcagcagtataataactggcctccctcgtggacgttcggccaagggaccaaggtggaaatcaaac

SEQ ID NO: 7754 - DNA, 334 bp, Homo sapiens
cagtctgccctgactcagcctgcctccgtgtctgggtctcctggacagtcgatcaccatctcctgcactggaaccagcagtgacgttggtaattataactatgtctcctggtaccaacaacacccaggcaaagcccccaaactcatgatttatgatgtcagtaatcggccctcaggggtttctaatcgcttctctggctccaagtctggcaacacggcctccctgaccatctctgggctccaggctgaggacgaggctgattattactgcagctcatatacaagcagcagcactctcgtggttttcggcggagggaccaagctgaccgtcctag

SEQ ID NO: 7755 - DNA, 322 bp, Homo sapiens
tcctatgagctgacacagccaccctcggtgtcagtgtccccaggacagacggccaggatcacctgctctggagatgcattgccaaagcaatatgcttattggtaccagcagaagccaggccaggcccctgtgctggtgatatataaagacagtgagaggccctcagggatccctgagcgattctctggctccagctcagggacaacagtcacgttgaccatcagtggagtccaggcagaagacgaggctgactattactgtcaatcagcagacagcagtggtacggtggtattcggcggagggaccaagctgaccgtcctag

SEQ ID NO: 7756 - DNA, 326 bp, Homo sapiens
tcctatgtgctgactcagccaccctcggtgtcagtggccccaggacagacggccaggattacctgtgggggaaacaacattggaagtaaaaatgtgcactggtaccagcagaagccaggccaggcccctgtgctggtcgtctatgatgatagcgaccggccctcagggatccctgagcgattctctggctccaactctgggaacacggccaccctgaccatcagcagggtcgaagccggggatgaggccgactattactgtcaggtgtgggatagtaatagtgatcatctatttgtcttcggaactgggaccaaggtcaccgtcct

SEQ ID NO: 7757 - DNA, 331 bp, Homo sapiens
cagtctgccctgactcagcctgcctccgtgtctgggtctcctggacagtcgatcaccatctcctgcactggaaccagcagtgacgttggtggttataactatgtctcctggtaccaacagcacccaggcaaagcccccaaactcatgatttatgatgtcagtaatcggccctcaggggtttctaatcgcttctctggctccaagtctggcaacacggcctccctgaccatctctgggctccaggctgaggacgaggctgattattactgcagctcatatacaagcagcagcactgtggtattcggcggagggaccaagctgaccgtcctag

SEQ ID NO: 7758 - DNA, 319 bp, Homo sapiens; identical to SEQ ID NO: 1688

SEQ ID NO: 7759 - DNA, 322 bp, Homo sapiens
gaaatagtgatgacgcagtctccagccaccctgtctgtgtctccaggggaaagagccaccctctcctgcagggccagtcagagtgttagcagcaacttagcctggtaccagcagaaacctggccaggctcccaggctcctcatctatggtgcatccaccagggccactggtatcccagccaggttcagtggcagtgggtctgggacagagttcactctcaccatcagcagcctgcagtctgaagattttgcagtttattactgtcagcagtataataactggtcggggacttttggccaggggaccaagctggagatcaaac

SEQ ID NO: 7760 - DNA, 319 bp, Homo sapiens
tcctatgagctgactcagccaccctcagtgtccgtgtccccaggacagacagccaccatcacctgctctggagataaattgggggataaatatgcttgctggtatcagcagaagccaggccagtcccctgtgctggtcatctatcaagatagcaagcggccctcagggatccctgagcgattctctggctccaactctgggaacacagccactctgaccatcagcgggacccaggctatggatgaggctgactattactgtcaggcgtgggacagcagggattatgtcttcggaactgggaccaaggtcaccgtcctag

SEQ ID NO: 7761 - DNA, 322 bp, Homo sapiens; identical to SEQ ID NO: 2298

SEQ ID NO: 7762 - DNA, 322 bp, Homo sapiens
tcctatgtgctgactcagccaccctcggtgtcagtggccccaggacagacggccaggattacctgtgggggaaacaacattggaagtgaaagtgtgcactggtaccagcagaagccaggccaggcccctgtgctggtcgtctttgatgatagcgaccggccctcagggatccctgagcgattctctggctccaactctgggaacacggccaccctgaccatcagcagggtcgaagccggggatgaggccgactattactgtcaggtgtgggatagtagtagtgatgaggtattcggcggagggaccaagctgaccgtcctag

SEQ ID NO: 7763 - DNA, 322 bp, Homo sapiens; identical to SEQ ID NO: 837

SEQ ID NO: 7764 - DNA, 325 bp, Homo sapiens; identical to SEQ ID NO: 903

SEQ ID NO: 7765 - DNA, 322 bp, Homo sapiens
gacatccagatgacccagtctccatcttccgtgtctgcatctgtaggagacagagtcaccatcagttgtcgggcgagtcaggatattagcaactggttagcctggtatcagcagaaaccagggaaagtccctaagctcctgatctatggtgcatccaggttgcaaagtggggtcccatcaaggttcagcggcagtggatctgggacagatttcactctcaccatcagcagcctgcagcctgaagattttgcaacttactattgtcaacaggctaacagtttccccttcacctttggccaagggacacgactggagattaaac

SEQ ID NO: 7766 - DNA, 337 bp, Homo sapiens
gatattgtgatgactcagtctccactctccctgcccgtcacccctggagagccggcctccatctcctgcaggtctagtcagagcctcctgcatagtaatggatacaactatttggattggtacctgcagaagccagggcagtctccacagttcctgatctatttgggctctaatcgggcctccggggtccctgacaggttcagtggcagtggatcaggcacagattttacactgaaaatcagcagagtggaggctgaggatgttggggtttattactgcatgcaagctctacaaactccccccactttcggcggagggaccaaggtggagatcaaac

SEQ ID NO: 7767 - DNA, 337 bp, Homo sapiens
aattttatgctgactcagccccactctgtgtcggagtctccggggaagacggtaaccatctcctgcacccgcagcagtggcagcattgccagcaactatgtgcagtggtaccagcagcgcccgggcagttcccccaccactgtgatctatgaggataaccaaagaccctctggggtccctgatcggttctctggctccatcgacagctcctccaactctgcctccctcaccatctctggactgaagactgaggacgaggctgactactactgtcagtcttatgatagcagcaatcttctttatgtcttcggaactgggaccaaggtcaccgtcctag

SEQ ID NO: 7768 - DNA, 322 bp, Homo sapiens; identical to SEQ ID NO: 3462

SEQ ID NO: 7769 - DNA, 328 bp, Homo sapiens
gaacttgtgttgacacagtctccagccaccctgtctttgtctccaggggaaagagccaccctctcctgcagggccagtcagagtgttagcagctacttagcctggtaccaacagaaacctggccaggctcccaggctcctcatctatgatgcatccaacagggctactggcatcccggccaggttcagtggcagtgggtctgggacagacttcactctcaccatcagcagcctagagcctgaggattttgcagtttatttctgtcagcagcgtagcgactggcctccggggctcactttcggcggagggaccaaggtggagatcaaac

SEQ ID NO: 7770 - DNA, 331 bp, Homo sapiens
cagtctgtgctgactcagccaccctcagcgtctgggacccccgggcagagggtcaccatctcttgttctggaagcagctccaacatcggacgtaatactgtaaactggtaccagcagctcccaggaacggcccccaaactcctcatctatattaataatcagcggccctcaggggtccctgaccgattctctgcctccaagtctggcacctcagcctccctggccatcagtgggctccagtctgaggatgaggctgattattactgtgcagcatgggatgacagcctgaatggttatgtcttcggaactgggaccaaggtcaccgtcctag

SEQ ID NO: 7771 - DNA, 331 bp, Homo sapiens
tcctatgtgctgactcagccaccctcggtgtcagtggccccaggacagacggccaggattacctgtgggggaaacaacattggaagtaaaagtgtgcactggtaccagcagaagccaggccaggcccctgtgctggtcgtctatgatgatagcgaccggccctcagggatccctgagcgattctctggctccaactctgggaacacggccaccctgaccatcagcagggtcgaagccggggatgaggccgactattactgtcaggtgtgggatagtagtagtgatcatccggcggtggtattcggcggagggaccaagctgaccgtcctag

SEQ ID NO: 7772 - DNA, 322 bp, Homo sapiens
gccatccagatggcccagtctccatcctccctgtctgcatctgtaggggacacagtcatcatcacttgccgggcaagtcagggcattacaaatgatttagcctggtatcaacagaaaccagggaaagcccctaaggtcctgatctatgctgcatccagtttacaaactggagtcccgtcaagattcagcggcagtgcttctggcacagatttcactctcaccatcagcagcctgcagcctgaagattttgcaacttattattgtctgcaggattacaattacccctacacttttggccaggggaccaagctcgagatcaaac

SEQ ID NO: 7773 - DNA, 340 bp, Homo sapiens
gacatcgtgatgacccagtctccagactccctggctgtgtctctgggcgagagggccaccatcaactgcaagtccagccagagtgttttatacagctccaacaataagaactacttagcttggtatcagcagaaaccaggacagcctcctaagctgctcatttactgggcatctacccgggaatccggggtccctgaccgattcagtggcagcgggtctgggacagatttcactctcaccatcagcagcctgcaggctgaagatgtggcagtttattactgtcagcaatattatagtactcctcggacgttcggccaagggaccaaggtggaaatcaaac

SEQ ID NO: 7774 - DNA, 332 bp, Homo sapiens
cagtctgccctgactcagcctgcctccgtgtctgggtctcctggacagtcgatcaccatctcctgcactggaaccagcagtgacgttggtggttataactatgtctcctggtaccaacaacacccaggcaaagcccccaaactcatgatttatgatgtcagtaatcggccctcaggggtttctaatcgcttctctggctccaagtctggcaacacggcctccctgaccatctctgggctccaggctgaggacgaggctgattattactgcagctcatatacaagcagcagcactcgaggtgttcggcggagggaccaagctgaccgtcctag

SEQ ID NO: 7775 - DNA, 331 bp, Homo sapiens
cagtctgtgttgacgcagccgccctcagtgtctgcggccccaggacagaaggtcaccatctcctgctctggaagcagctccaacattgggaataattatgtatcctggtaccagcagctcccaggaacagcccccaaactcctcatttatgacaattataagcgaccctcagggattcctgaccgattctctggctccaagtctggcacgtcagccaccctgggcatcaccggactccagactggggacgaggccgattatcactgcggaacatgggatagcagcctgagtgctggcgtgttcggcggagggaccaagctgaccgtcctag

SEQ ID NO: 7776 - DNA, 330 bp, Homo sapiens
cagtctgtgttgacgcagccgccctcagtgtctgcggccccaggacagaaggtcaccatctcctgctctggaagcacctccaacattgggaataattatgtatcctggtaccagcagctcccaggaacagcccccaaactcctcatttatgacaataatcagcgaccctcagggattcctgaccgattctctggctccaagtctggcacgtcagccaccctgggcatcaccggactccagactggggacgaggccgattattactgcggaacatgggatagcagcctgagtgctggcgtgttcggcggagggaccaagctgaccgtccta

SEQ ID NO: 7777 - DNA, 334 bp, Homo sapiens
gatgttgtgatgactcagtctccactctccctgcccgtcacccttggacagccggcctccacctcctgcaggtctagtcaaagcctcgtttacagtcatggaaacacctacttgaattggtctcagcagaggccaggccaatctccaaggcgcctaatttacaaggtttctcagtgggactctggggtcccagacagattcagcggcagtgggtcaggcactgatttcacactgaaaatcagcagggtggaggctgaggatgttggggcttgttattgcatgcaaggtacacactggcctcccttcggccaagggacacgactggagattaaac

SEQ ID NO: 7778 - DNA, 328 bp, Homo sapiens
tcctatgagctgacacagccaccctcggtgtcagtgtccccaggacagacggccaggatcacctgctctggagatgcattgccaaagcaatatgcttattggtaccagcagaagccaggccaggcccctgtgctggtgatatataaagacagtgagaggccctcagggatccctgagcgattctctggctccagctcagggacaacagtcacgttgaccatcagtggagtccaggcagaagacgaggctgactattactgtcaatcagcagacagcagtggtacttatccgggagtgttcggcggagggaccaagctgaccgtcctag

SEQ ID NO: 7779 - DNA, 331 bp, Homo sapiens
cagtctgccctgactcagcctgcctccgtgtctgggtctcctggacagtcgatcaccatctcctgcactggaaccagcagtgacgttggtcgttataactatgtctcctggtaccaacaacacccaggcaaagcccccaaactcatgatttatgatgtcggtaatcggccctcaggggtttctaatcgcttctctggctccaagtctggcaacacggcctccctgaccatctctggactccaggctgaagacgaggctgattattactgcagctcatttacaaccatcagcacttgggtgttcggcggagggaccaagctgaccgtcctag

SEQ ID NO: 7780 - DNA, 322 bp, Homo sapiens; identical to SEQ ID NO: 5906

SEQ ID NO: 7781 - DNA, 330 bp, Homo sapiens
cagtctgtgctgactcagccaccctcagcgtctgggacccccgggcagagggtcaccatctcttgttctggaagcagctccaacatcggaagtaatactgtaaactggtaacagcagctcccaggaacggcccccaaactcctcatctatagtaataatcagcggccctcaggggtccctgaccgattctctggctccaagtctggcacctcagcctccctggccatcagtgggctccagtctgaggatgaggctgattattactgtgcagcatgggatgacagcctgaatggtcggtattcggcggagggaccaagctgaccgtcctag

SEQ ID NO: 7782 - DNA, 325 bp, Homo sapiens
gaaattgtgttgacgcagtctccaggcaccctgtctttgtctccaggggaaagagccaccctctcctgcagggccagtcagagtgttagcagcagctacttagcctggtaccagcagaaacctggccaggctcccaggctcctcatctatggtgcatccagcagggccactggcatcccagacaggttcagtggcagtgggtctgggacagacttcactctcaccatcagcagactggagcctgaagattttgcagtgtattattgtcagcagtatggcagctctccaacgacgttcggccaagggaccaaggtggaaatcaaac

SEQ ID NO: 7783 - DNA, 322 bp, Homo sapiens
gacatccagatgacccagtctccatcctccctgtctgcatctgtaggagacagagtcaccatcacttgccgggcaagtcagggcattagaaatgatttaggctggtatcagcagaaaccagggaaagcccctaagcgcctgatctatgctgcatccagtttgcaaactggggtcccatcaaggttcagcggcagtggatctgggacagaattcactctcacaatcagcagcctgcagcctgaagattttgcaacttattactgtctacagcataatagttaccctcggacttttggccaggggaccaagctggagatcaaac

SEQ ID NO: 7784 - DNA, 322 bp, Homo sapiens
gacatccagatgacccagtctccttccaccctgtctgcttctgtaggagacagagtcaccatcacttgccgggccagtcagagtattaataactggttggcctggtatcagcagaaaccaggggaagcccctgatctcctgatctataaggcgtctagtttagaacgtggggtcccatcaaggttcagcggcagtggatctgggacagaattcactctcaccatcagcagcctgcagcctgatgattttgcaacttattactgccaacagtataatagttaccccctcactttcggcggagggaccaaggtggagatcaaac

SEQ ID NO: 7785 - DNA, 325 bp, Homo sapiens
gacatccagatgacccagtctccatcctccctgtctgcatctgtaggagacagagtcaccatcacttgccgggcaagtcagagcattagcagttatttaaattggtatcagcagaaaccagggaaagcccctaagctcctgatctatgctgcatccagtttgcaaagtggggtcccatcaaggttcagtggcagtggatctgggacagatttcactctcagcatcagcagtctgcaacctgaagattttgcaacttattactgtcaacagagttacgaaacccccccgtggacgttcggccaagggaccaaggtggaaatcaaac

SEQ ID NO: 7786 - DNA, 328 bp, Homo sapiens
gacatccagatgacccagtctccatcctccctgtctgcatctgttggagacaaagtcaccatcacttgccaggcgagtcaggacattagtaactatttaagttggtatcagcaaaaaccagggaaagcccctaacctcctgatctacgatgcatccaatttgcaaacaggggtcccatcaaggttcagtggaagtggatctgggacagattttactttcaccatcagcagcctgcagcctgaagatattgcaacatattactgtcaacagtctgataatctcctcccggggttcactttcggccctgggaccaaagtggatatcaaac

SEQ ID NO: 7787 - DNA, 318 bp, Homo sapiens
gacatccagttgacccagtctccatcctccctgtctgcatctgtaggagacagagtcaccatcacttgccgggtgagtcagggcattagcagttatttaaattggtatcggcagaaaccagggaaagttcctaagctcctgatctatagtgcatccaatttgcaatctggagtcccatctcggttcagtggcagtggatctgggacagatttcactctcactatcagcagcctgcagcctgaagatgttgcaacttattacggtcaacggacttacaatgcccccccttcggccctgggaccaaagtggatatcaaac

SEQ ID NO: 7788 - DNA, 340 bp, Homo sapiens
gacatcgtgatgacccagtctccagactccctggctgtgtctctgggcgagagggccaccatcaactgcaagtccagccagagtgttttatacatctccaacaataagaactacttagcttggtaccagcagaaaccaggacagcctcctaagctgctcatttactgggcatctacccgggaatccggggtccctgaccgaatcagtggcagcgggtctgggacagatttcactctcaccatcagcagcctgcaggctgaagatgtggcagtttattactgtcagcaatattatagtactccttacacttttggccaggggaccaagctggagatcaaac

SEQ ID NO: 7789 - DNA, 322 bp, Homo sapiens
gacatccagatgacccagtctccatcctccctgtctgcatctgtaggagacagagtcaccatcacttgccgggcaagtcagagcattagcagctatttaaattggtatcagcagaaaccagggaaagcccctaagctcctgatcgatgctgcatccagtttgcaaagtggggtcccatcaaggttcagtggcagtggatctgggacagatttcactgtcaccatcagcagtctgcaacctgaagattttgcaacttactactgtcaacagacttacagaaccccgtacacgtttggccaggggaccaaactggagatcaaac

SEQ ID NO: 7790 - DNA, 325 bp, Homo sapiens
gacatccagatgacccagtctccatcctccctgtctgcatctgtaggagacagagtcaccatcacttgccgggcaagtcagaccattagcagctatttaaattggtatcagcagaagccagggaaagcccctaagctcctgatctatgctgcatccagtttgcaaagtggggtcccatcaaggttcagtggcagtggatctgggacagatttcactctcaccatcagcggtctgcaacctgaagattttgcaagttactactgtcaacagagttacagtagccctcagatcactttcggccctgggaccaaggtggatatcaaac

SEQ ID NO: 7791 - DNA, 346 bp, Homo sapiens
cagtctgtgctgacgcagccgccctcagtgtctggggccccagggcagagggtcaccatctcctgcactgggagcagctccaacatcggggcagcttatgatgtacactggtaccagcagcttccaggaacagcccccaaactcctcatctatggtaacaacaatcggccctcaggggtccctgaccgattctctggctccaagtctggcacctcagcctccctggccatcactgggctccaggctgaggatgaggctgattattactgccagtcgtatgacagcagcctgggtcatttcggtttccgtgtggtattcggcggagggaccaagctgaccgtcctag

SEQ ID NO: 7792 - DNA, 322 bp, Homo sapiens
gacatccagatgacccagtctccttccaccctgtctgcatctgtcggagacagagtcaccatcacttgccggaccagtcagagtatcagtagctggttggcctggtatcagcagaaaccagggaaagcccctaagctcctgatctataaggcgtctactttagaaagtggggtcccatcaaggttcagcggcagtggatctgggacagaattcactctcaccatcagcagcctgcagcctgatgattttgcaacttattactgccaacagtataatagttatttctacacttttggccaggggaccaagctggagatcaaac

SEQ ID NO: 7793 - DNA, 329 bp, Homo sapiens
cagactgtggtgactcaggagccctcactgactgtgtccccaggagggacagtcactctcacctgtgcttccagcactggagcagtcaccagtggttactatccaaactggttccagcagaaacctggacaagcacccagggcactgatttatagtacaagcaacaaacactcctggacccctgcccggttctcaggctccctccttgggggcaaagctgccctgacactgtcaggtgtgcagcctgaggacgaggctgagtattactgcctgctctactatggtggtgctctaggtgttcggcggagggaccaagctgaccgtcctag

SEQ ID NO: 7794 - DNA, 319 bp, Homo sapiens
gaaattgtgttgacacagtctccagccaccctgtctttgtctccaggggaaagagccaccctctcctgcagggccagtcagaatgttaacaactacttagcctggtaccaacagaaacctggccaggctcccaggctcctcatctatgatgcatccgacagggccactggcatcccagccaggttcagtggcagtgggtctggggtggacttcactctcaccatcagcagcctagagcctgaagattttgcagtttattactgtcagcagcgtagcaactggcccatcaccttcggccaaggggcacgactggagatta

SEQ ID NO: 7795 - DNA, 334 bp, Homo sapiens
cagtctgccctgactcagcctgcctccgtgtctgggtctcctggacagtcgatcaccatctcctgcactggaaccagcagtgacgttggtggttataactatgtctcctggtaccaacaacacccagccaaagcccccaaactcatgatttatgatgtcactaatcggccctcaggggtttctaatcgcttctctggctccaagtctggcaacacggcctccctgaccatctctgggctccaggctgaggacgaggctgattattactgcagctcatatacaggcagcagcactctctatgtcttcggaactgggaccaaggtcaccgtcctag

SEQ ID NO: 7796 - DNA, 322 bp, Homo sapiens
gccatccggatgacccagtctccatcctcattctctgcatctacaggagacagagtcaccatcacttgtcgggcgagtcagggtattagcagttatttagcctggtatcagcaaaaaccagggaaagcccctaagctcctgatctatgctgcatccactttgcaaagtggggtcccatcaaggttcagcggcagtggatctgggacagatttcactctcaccatcagctgcctgcagtctgaagattttgcaacttattactgtcaacagtattatagttaccctttcactttcggccctgggaccaaagtggatatcaaac

SEQ ID NO: 7797 - DNA, 331 bp, Homo sapiens
cagtctgccctgactcagcctccctccgcgtccgggtctcctggacagtcagtcaccatctcctgcactggaaccagcagtgacgttggtggttataactatgtctcctggtaccaacagcacccaggcaaagcccccaaactcatgatttatgaggtcagtaagcggccctcaggggtccctgatcgcttctctggctccaagtctggcaacacggcctccctgaccgtctctgggctccaggctgaggatgaggctgattattactgcaactcatatgcaggcagccacaattttgtcttcggaactgggaccaaggtcaccgtcctag

SEQ ID NO: 7798 - DNA, 329 bp, Homo sapiens
cagactgtggtgacccaggagccatcgttctcagtgtcccctggagggacagtcacactcacttgtggcttgagttctggctcagtctctactagttacttccccagctggtaccagcagaccccaggccaggctccacgcacgctcatctacaacaccaatattcggtcttcgggggtcccagatcgcttctctggctccatccttgggaacaaagctgccctcaccatcacgggggcccaggcagacgatgaatgtgattattattgtgtgctgtgtctgagtaatggcaattgggtgttcggcggagggaccaagctgaccgtcct

SEQ ID NO: 7799 - DNA, 337 bp, Homo sapiens
gatattgtgatgactcagtctccactctccctgcccgtcacccctggagagccggcctccatctcctgcaggtctagtcagagcctcctgcatagtaatggatacaactatttggattggtacctgcagaagccagggcagtctccacagctcctgatctatttgggttctaatcgggcctccggggtccctgacaggttcagtggcagtggatcaggcacagattttacactgagaatcagcagagtggaggctgaggatgttggggtttattactgcatgcaagctctacaaactttgtacacttttggccaggggaccaagctggagatcaaac

SEQ ID NO: 7800 - DNA, 322 bp, Homo sapiens
gacatccagatgacccagtctccatcttccgtgtctgcatctgtaggagacagagtcaccatcacttgtcgggcgagtcagggtattaccagctggttagcctggtatcagcagaaaccagggaaagcccctaagctcctgatctatgctgcatccagtttgcaaagtggggtcccatcaaggttcagcggaagtggatctgggacagatttcactctcaccatcagcagcctgcagcctgaagattttgcaacttactattgtcaacaggctcacagtttccctttcactttcggccctgggaccaaagtggatatcaaac

SEQ ID NO: 7801 - DNA, 334 bp, Homo sapiens; identical to SEQ ID NO: 1670

SEQ ID NO: 7802 - DNA, 322 bp, Homo sapiens
gacatccagatgacccagtctccatcctccctgtctgcatctgtaggagacagagtcaccatcacttgccgggcgagtcagggcattagcaattatttagcctggtatcagcagaaaccagggaaagttcctaagctcctgatctatgctgcatccactttgcaatcaggggtcccatctcggttcagtggcagtggatctgggacagatttcactctcaccatcagcagcctgcagcctgaagatgttgcaacttattactgtcaaaagtataacagtgcccctcaaacgttcggccaagggaccaaggtggaaatcaaac

SEQ ID NO: 7803 - DNA, 328 bp, Homo sapiens
gaaattgtgttgacacagtctccagccaccctgtctttgtctccaggggaaagagccaccctctcctgcagggccagtcagagtgttagcagctacttagcctggtaccaacagaaacctggccaggctcccagactcctcatctatgatgcatccaacagggccactggcatcccagccaggttcagtggcagtgggtctgggacagacttcactctcaccatcagcagcctagagcctgaagattttgcagtttattactgtcagcagcgtagcaactggcctccggcactcactttcggcggagggaccaaggtggagatcaaac

SEQ ID NO: 7804 - DNA, 322 bp, Homo sapiens; identical to SEQ ID NO: 4554

SEQ ID NO: 7805 - DNA, 328 bp, Homo sapiens
gaaattgtgttgacacagtctccagccaccctgtctttgtctccaggggaaagagccaccctctcctgcagggccagtcagagtgttagcagctacttagcctggtaccaacagaaacctggccaggctcccaggctcctcatctatgatgcatccaacagggccactggcatcccagccaggttcagtggcagtgggtctgggacagacttcactctcaccatcagcagcctagagcctgaagattttgcagtttattactgtcagcagcgtagcaactggcctccgagggtcactttcggccctgggaccaaagtggatatcaaac

SEQ ID NO: 7806 - DNA, 322 bp, Homo sapiens
gaaattgtgttgacacagtctccagccaccctgtctttgtctccaggggaaagagccaccctctcctgcagggccagtcagagtattagcaggtccttagcctggtaccaacataaacctggccaggctcccaggctcctcatctatgatgcatccaacagggccactggcatcccagccaggttcagtggcagtgggtctgggacagacttcactctcaccgtcagcagcctagagcctgaagattctgcagtttattactgtcagcagcgtagcgcctggccgctcactttcggcggagggaccaaggtggagatcaaac

SEQ ID NO: 7807 - DNA, 325 bp, Homo sapiens
gacatccagatgacccagtctccatcctccctgtctgcatctgtaggagacagagtcaccatcacttgccgggcaagtcagagcgttggcagctatttaaattggtatcagcagaaaccagggacagcccctaacctcctgatctatactgcatccactttgcaaagtggggtcccatcaaggttcagtggcagtggatctgggacagatttcactctcaccatcagcagtctgcaacctgaagattttgcaacttactactgtcaacagagttatagtattcctggggtcactttcggcggagggaccaaggtggagatcaaac

SEQ ID NO: 7808 - DNA, 322 bp, Homo sapiens; identical to SEQ ID NO: 3949

SEQ ID NO: 7809 - DNA, 322 bp, Homo sapiens
gacatccagatgacccagtctccatcctccctgtctgcatctgtaggagacagagtcaccatcccttgccaggcgagtcaggacattagcaactatttaaattcgtatcagcagaaaccagggaaagcccctaagctcctgatctaccatgcatccaatttggaaacaggggtcccatcaaggttcagtggaagtggatctgggacagattttactttcaccgtcagcagcctgcagcctgaagatattgcaacatattactgtcaacagtatgataatctccctttcaccttcggccaagggacacgactggagattaaac

SEQ ID NO: 7810 - DNA, 322 bp, Homo sapiens
gacatccagatgacccagtctccatcctccctgtctgcatctgtaggagacagagtcaccatcacttgccgggcaagtcagagcattagtaactatttaatttggtatcaccagaaaccagggaaagcccctaagctcctgatctatgctgcatccagtttgcaaagtggggtcccatcaaggttcagtggcagtggatctgggacagatttcactctcaccatcagcagtctgcaacctgaagattttgcaacttactactgtcaacagagttacagtaccccttacacttttggccaggggaccaagctggagatcaaac

SEQ ID NO: 7811 - DNA, 325 bp, Homo sapiens
tcctatgagctgacacagccaccctcggtgtcagtgtccccaggacaaacggccaggatcacctgctctggagatgcattgccacaaaaatatgcttattggtaccagcagaagtcaggccaggcccctgtgctggtcatctatgaggacaacaaacgaccctccgggatccctgagagattctctggctccagctcagggacaatggccaccttgactatcagtggggcccaggtggaggatgaagctgactactactgttactcaagagacagtagtggtaatctttgggtgttcggcggagggaccaagctgaccgtcctag

SEQ ID NO: 7812 - DNA, 337 bp, Homo sapiens
gatattgtgatgactcagtctccactctccctgcccgtcacccctggagagccggcctccatctcctgcaggtctagtcagagcctcctgcataataatggatacaactatttggattggtacctgcagaagccagggcagtctccacagctcctgatctatttgggttctaatcgggcctccggggtccctgacaggttcagtggcagtggatcaggcacagattttacactgaaaatcagcagagtggaggctgaggatgttggggtttattactgcatgcaagctctacaaactccgtggacgttcggccaagggaccaaggtggaaatcaaac

SEQ ID NO: 7813 - DNA, 322 bp, Homo sapiens
gacatccagatgacccagtctccatcatccctgtctgcatctgtaggagacagagtcaccatcacttgccgggcgagtcaggacattaacaattatttagcctggtatcagcagaaaccagggaaagttcctaacctcctgatctatgctgcatccactttgcaatcaggggtcccatctcggttcagtggcagtggatctgggacagatttcactctcaccatcagcagcctgcagcctgaagatgttgcaacttattactgtcaaaaatataacggtgccctctcgactttcggcggagggaccaaggtggagatcaaac

SEQ ID NO: 7814 - DNA, 319 bp, Homo sapiens; identical to SEQ ID NO: 3974

SEQ ID NO: 7815 - DNA, 325 bp, Homo sapiens
tcctatgagctgactcagccaccctcagtgtccgtgtccccaggacagacagccagcatcacctgctctggagataaattgggggataaatatgcttgctggtatcagcagaagccaggccagtcccctgtgctggtcatctatcaagatagcaagcggccctcagggatccctgagcgattctctggctccaactctgggaacacagccactctgaccatcagcgggacccaggctatggatgaggctgactattactgtcaggcgtgggacagcagcactgccctttatgtcttcggaactgggaccaaggtcaccgtcctag

SEQ ID NO: 7816 - DNA, 325 bp, Homo sapiens
tcctatgagctgacacagccaccctcggtgtcactgtccccaggacaaacggccaggatcacctgctctggagatgcagtgccaagaaagtatgcttattggtaccagcagaagtcaggccaggcccctgttctggtcatctatgaggacaacaaacgaccctccgggatccctgagagattctctggctccagctcagggacaatggccaccttgactatcagtggggcccaggtgggggatgaagctgactactactgtttctcaacagacagcagtggttatcattgggtgttcggcggagggaccaagctgaccgtcctag

SEQ ID NO: 7817 - DNA, 325 bp, Homo sapiens
tcctatgagctgacacagccaccctcggtgtcagtgtccccaggacagacggccaggatcacctgctctggagatgcattgccaaagcaatatgcttattggtaccagcagaagccaggccaggcccctgtgctggtgatatataaagacagtgagaggccctcagggatccctgagcgattctctggctccagctcagggacaacagtcacgttgaccatcagtggagtccaggcagaagacgaggctgactattactgtctatcagcagacagcagtgggacttttgtggttttcggcggagggaccaagctgaccgtcctag

SEQ ID NO: 7818 - DNA, 328 bp, Homo sapiens
tcctatgagctgacacagccaccctcggtgtcagtgtccccaggacaaacggccaggatcacctgctctggagatgcattgccaaaaaaatatgcttattggtaccagcagaagtcaggccaggcccctgtgctggtcatctatgaggacagcaaacgaccctccgggatccctgagagattctctggctccagctcagggacaatggccaccttgactatcagtggggcccaggtggaggatgaggctgactactactgttactcaacagacagcagtgataatcatctttgggtgttcggcggagggaccaaactgaccgtcctag

SEQ ID NO: 7819 - DNA, 322 bp, Homo sapiens
tcctatgagctgacacagccaccctcggtgtcagtgtccccaggacaaacggccaggatcacctgctctggagatgcattgccaaaaaaatatgcttattggtaccagcagaagtcaggccaggcccctgtgctggtcatctatgaggacagcaaacgaccctccgggatccctgagagattctctggctccagctcagggacaatggccaccttgactatcagtggggcccaggtggaggatgaagctgactactactgttactcaacagacagcagtggtaattgggtgttcggcggagggaccaagctgaccgtcctag

SEQ ID NO: 7820 - DNA, 337 bp, Homo sapiens
cagtctgccctgactcagcctgcctccgtgtctgggtctcctggacagtcgatcaccatctcctgcactggaaccagcagtgatgttgggagttataaccttgtctcctggtaccaacagcacccaggcaaagcccccaaactcatgatttatgagggcagtaagcggccctcaggggtttctaatcgcttctctggctccaagtctggcaagacggcctccctgacaatctctgggctccaggctgaggacgaggctgattattactgctgctcatatgcaggtagtagtatttcctatgtggtcttcggcggagggaccaagctgaccgtcctag

SEQ ID NO: 7821 - DNA, 322 bp, Homo sapiens
gacatccagatgacccagtctccatcctgcctgtctgcatctgtaggagacagagtcaccatcacttgccgggcgactcagggcattagcgattatttagcctggtatcagcagaaaccagggaaagttcctaagctcctgatctatgctgcatccactttgcaatcaggggtcccatctcggttcagtggcagtggatctgggacagatttcactctcaccatcagcagcctgcagcctgaagatgttgcaacttattactgtcaaaactataacagtgccccttggacgttcggccaagggaccaaggtggaaatcaaac

SEQ ID NO: 7822 - DNA, 325 bp, Homo sapiens
gaaattgtgttgacgcagtctccaggcaccctgtctttgtctccaggggaaagagccaccctctcctgcagggccagtcagagtgtaagcagcagctacttagcctggtaccagcagaaacctggccaggctcccagggtcctcatctatggtgcatccatcagggccactggcatcccagacaggttcagtggcagtgggtctgggacagacttcactctcaccatcagcagactggagcctgaagattttgcagtgttttactgtcagcagtatggtagctcaccgtggacgttcggcccagggaccaaggtggaaatcaaac

SEQ ID NO: 7823 - DNA, 325 bp, Homo sapiens
gaaattgtattgacgcagtctccaggcaccctgtctttgtctccaggggaaagagccaccctctcctgcagggccagtcagagtgttagcagcagctacttggcctggtaccagcaaaaacctggccaggctcccaggctcctcatctatggtgcatccagcagggccactggcatcccagacaggttcagtggccgtgggtctgggacagacttcactctcaccatcagcagactggagcctgaagatgttgcagtgtattactgtcagcaatatggtagctcaccgtggacgttcggccaagggaccaaggtggaaatcaaac

SEQ ID NO: 7824 - DNA, 325 bp, Homo sapiens
gaaattgtgttgacgcagtctccaggcaccctgtctttgtctccaggggaaagagccaccctctcctgcagggccagtcagagtgttagcagctactacttagcctggtaccagcagaaacctggcctggctcccaggctcctcatctatggtccttccagcagggccactggcatccccgacaggttcagtggcagtggctctgggacagacttcactctcaccatcagcagactggagcctgaagattttgcagtgtattactgtcagcagtatggtaactcaccgtggacgttcggccaagggaccaaggtggaaatcaaac

SEQ ID NO: 7825 - DNA, 319 bp, Homo sapiens; identical to SEQ ID NO: 1688

SEQ ID NO: 7826 - DNA, 337 bp, Homo sapiens
cagtctgtgctgacgcagccgccctcagtgtctggggccccagggcagagggtcaccatctcctgcactgggagcagctccaacatcggggcaggttatgatgtacactggtaccagcagcttccaggaacagcccccaaactcctcatctatggtaacatcaatcggccctcaggggtccctgaccgattctctggctccaagtctggcacctcagcctccctggccatcactgggctccaggctgaggatgaggctgattattactgccagtcctatgacagcagcctgagtgctttttatgtcttcggaactgggaccaaggtcaccgtcctag

SEQ ID NO: 7827 - DNA, 322 bp, Homo sapiens
gacatccagctgacccagtctccatccttcctgtctgcatctgtaggagacagagtcaccatcacttgccgggccagtcagggcattagcagttatgtagcctggtatcagcaaaaaccagggaaagcccctgagctcctgatctatgctgcatccactttgcaaactggggtcccatcaaggttcagcggcagtaaatctgggacagaactcactctcacaatcagcagcctgcagcctgaagattttgcaacttattactgtcaacagcttaatagtcaccctcacactttcggcggggggaccaaggtggagatcaaac

SEQ ID NO: 7828 - DNA, 337 bp, Homo sapiens
gatattgtgatgactcagtctccactctccctgcccgtcacccctggagagccggcctccatctcctgcaggtctagtcagagcctcctgcacagtaatggatacaactatttggattggtacctgcagaagccagggcagtctccacagctcctgatctatttgggttctaatcgggcctccggggtccctgacaggttcagtggcagtggatcaggcacagatttcacactgaaaatcagcagagtggaggctgaggatgttggggtttattactgcatgcaagctctacaaactctgtacacttttggccaggggaccaagctggagatcaaac

SEQ ID NO: 7829 - DNA, 325 bp, Homo sapiens
tcctatgtgctgactcagccaccctcggtgtcagtggccccaggacagacggccaggattacctgtgggggaaacaacattggaagtaaaagtgtgcactggtaccagcagaagccaggccaggcccctgtgctggtcgtctatgatgatagcgaccggccctcagggatccctgagcgattctctggctccaactctgggaacacggccaccctgaccatcagcagggtcgaagccggggatgaggccgactattactgtcaggtgtgggatagtagtagtgatggtgtggtattcggcggagggaccaagctgaccgtcctag

SEQ ID NO: 7830 - DNA, 331 bp, Homo sapiens
cagtctgtgctgactcagccaccctcagcgtctgggacccccgggcagagggtcaccatctcttgttctggaagcagctccaacatcggaagtaattatgtatattggtaccagcagctcccaggaacggcccccaaactcctcatctataggaataatcagcggccctcaggggtccctgaccgattctctggcgccaagtctggcacctcagcctccctggccatcagtgggctccggtccgaggatgaggctgattattactgtgcagcatgggatgtcagcctgagtggtctggtattcggcggagggaccaagctgaccgtcctag

SEQ ID NO: 7831 - DNA, 325 bp, Homo sapiens; identical to SEQ ID NO: 1686

SEQ ID NO: 7832 - DNA, 330 bp, Homo sapiens
cagtctgtgctgactcagccaccctcagcgtctgggacccccgggcagagggtcaccatctcttgttctggaatcagctccaacatcggaagtaattatgtatactggtaccagcaattcccaggaacggcccccaaactcctcatctacaagaataatcagcggcccgcaggggtccctgaccgattctctggctccaagtctggcacttcagcctccctggccatcagtgggctccggtccgaggatgaggctgagtattactgtgcatcatgggatggcagcctgagtgcctttctattcggcggagggaccaagctgaccgtccta

SEQ ID NO: 7833 - DNA, 325 bp, Homo sapiens; identical to SEQ ID NO: 4626

SEQ ID NO: 7834 - DNA, 325 bp, Homo sapiens
gaaatagtgatgacgcagtctccagccaccctgtctgtgtctccaggggaaagagccaccctctcctgcagggccagtcagagtgttagcagcaacttagcctggtatcagcagagacctggccaggctcccaggctcctcatctatggtgcatccttcagggccgctggtatcccagccaggttcagtggcagtgggtctgggacagagttcactctcaccatcagcagcctgcagtctgaagattttgcagtttattactgtcagcagtatgataactggcctccgtacacttttggccaggggaccaaggtggagatcaaac

SEQ ID NO: 7835 - DNA, 325 bp, Homo sapiens; identical to SEQ ID NO: 872

SEQ ID NO: 7836 - DNA, 335 bp, Homo sapiens
gatgttgtgatgactcagtctccactctccctgcccgtcacccttggacagccggcctccatctcctgcaggtctagtcaaagcctcgtatacattgatggaaacacctacttgaattggtttcagcagaggccaggccaatctccaaggcgccgaatttataaggtttctaaccgggactctggggtcccagacagattcagcggcagtgggtcaggcactgatttcacactgaaaatcagctgggtggaggctgaggatcttgggatttattactgcatgcaacgttcacactggctggacgttcggccaagggaccaaggtggaaatcaaac

SEQ ID NO: 7837 - DNA, 322 bp, Homo sapiens
gacatccagatgacccagtctccatcctccctgtctgcatctgtaggagacagagtcaccatcacttgccgggcaagtcagagcatttacagctatttaaattggtatcagcagaaaccagggaaagcccctaagctcctgatctatggtgcatccagtttgcaaagtggggtcccatcaaggttcagtggcagtggatctgggacagatttcactctcaccatcagcagtctgcaatctgaagattttgcaacttactactgtcaacagagtttcagtacccccgccaccttcggccaagggacacgactggagattaaac

SEQ ID NO: 7838 - DNA, 322 bp, Homo sapiens; identical to SEQ ID NO: 1779

SEQ ID NO: 7839 - DNA, 322 bp, Homo sapiens
gacatccagatgacccagtctccatcctccctgtctgcatctgtaggagacagagtctccatcacttgccggtcaagtcaggacattagcacctatttaaattggtatcagcagaaagcagggaaagcccctaagctcctgatctatgctgcatccagtttgcaaagtggggtcccatcaaggttcagtggcagtgggtctgggacagatttcactctcaccatcaacagtctgcaacctgaagattttgcaacttactactgtcagcacagttacagtacccccgtagcttttggccaggggaccaagctggagatcaaac

SEQ ID NO: 7840 - DNA, 322 bp, Homo sapiens; identical to SEQ ID NO: 2631

SEQ ID NO: 7841 - DNA, 322 bp, Homo sapiens
gacatccagatgacccagtctccatcttctgtgtctgcatctgtaggagacagagtcaccatcacttgtcgggcgagtcagggtattagcagctggttagcctggtatcagcagaaaccagggaaagcccctaagctcctgatctatgatgcatccagtttgcaaagtggggtcccatcaaggttcagcggcagtggatctgggacagatttcactctcactatcagcagcctgcagcctgaagattttgcaacttactattgtcaacaggctaacagtttcccattcactttcggccctgggaccaaagtggatatcaaac

SEQ ID NO: 7842 - DNA, 337 bp, Homo sapiens
cagtctgtgctgacgcagccgccctcagtgtctggggccccagggcagagggtcaccatctcctgcactgggagcagctccaacatcgggtcaggttatgatgtacactggtaccagcagcttccaggaacagcccccaaactcctcatctatggtaacagcaatcggccctcaggggtccctgaccgattctctggctccaagtctggcacctcagcctccctgggcatcagtgggctccaggctgaggatgaggctgattattactgccattcttatgacagcagcctgagtggtaaggaggtcttcggaactgggaccaaggtcaccgtcctag

SEQ ID NO: 7843 - DNA, 331 bp, Homo sapiens
cagtctgccctgactcagcctgcctccgtgtctgggtctcctggacagtcgatcaccatctcctgcactggaaccagcagtgatgttggcagttataaccttgtctcctggtaccaacagcacccaggcaaagcccccaaattcatgatttatgagggcagtaagcggccctcaggggtttctaatcgcttctctggctccaagtctgacaacacggcctccctgacaatctctgggctccaggctgaggacgaggctgattattactgctgctcatatgcaggtagtagcacttttgtcttcggaactgggaccaaggtcaccgtcctag

SEQ ID NO: 7844 - DNA, 334 bp, Homo sapiens
cagtctgtgttgacgcagccgccctcagtgtctgcggccccaggacagaaggtcaccatctcctgctctggaagcagctccaacattgggaagaattatgtgtcctggtaccagcagctcccaggaacagcccccaaactcctcatttatgacaataataagcgaccctcagggattcctgaccgattctctggctccaagtctggcacgtcagccaccctgggcatcaccggactccagactggggacgaggccgattattactgcggaacatgggatagcagcctgagtgcccgtggggtattcggcggagggaccaagctgaccgtcctag

SEQ ID NO: 7845 - DNA, 331 bp, Homo sapiens
cagtctgccctgactcagcctgcctccgtgtctgggtctcctggacagtcgatcaccatctcctgcactggaaccagcagtgatgttgggaataatgaccttgtctcctggtaccaacaacacccaggcaaagtccccaaactcatcatttatgaggtcactaagcggccctcagggctttctaatcgcttctctggctccaagtctggcaacacggcctccctgacaatctctgggctccaggctgaggacgaggctgattattattgttgttcatatgcaattagtaggggggtggcattcggcggagggaccaagctgaccgtcctag

SEQ ID NO: 7846 - DNA, 340 bp, Homo sapiens
gatattgtgatgactcagtctccactctccctgcccgtcacccctggagagccggcctccatctcctgcaggtctagtcagagcctcctgcatagtaatggatacaactatttggattggtacctgcagaagccagggcagtctccacagctcctgatctatttgggttctaatcgggcctccggggtccctgacaggttcagtggcagtggatcaggcacagattttacactgaaaatcagcagagtggaggctgaggatgttggggtttattactgcatgcaagctctacaaactcccttgctcactttcggcggagggaccaaggtggagatcaaac

SEQ ID NO: 7847 - DNA, 331 bp, Homo sapiens
cagtctgccctgattcagcctccctccgtgtccgggtctcctggacagtcagtcaccatctcctgcactggaaccagcagtgatgttgggagttgtgactatgtctcctggtaccaacagcacccaggcacagtccccaaacccatgatctacaatgtcaatactccgccctcaggggtccctgatcgtttctctggctccaagtctggcaatacggcctccatgaccatctctggactccaggctgaggacgaggctgattattagtgctgctcatatacaagcagtgcctcttaagggctcggcggagggaccgaactgaccgtcctag

SEQ ID NO: 7848 - DNA, 322 bp, Homo sapiens; identical to SEQ ID NO: 6119

SEQ ID NO: 7849 - DNA, 322 bp, Homo sapiens
gacatccagatgacccagtctccatcctccctgtctgcatctgtaggagacagagtcaccatcacttgccaggcgagtcaggacattagcaagtatttaaattggtatcagcagaaaccagggaaagcccctaagctcctgatctacgatgtatccaatttggaaacaggggtcccatcaaggttcagtggaagtggatctgggacagattttactttcatcatcagcagcctgcagcctgaagacattgcaacatattactgtcaacagtatgataatctccccttcactttcggccctgggaccaaagtggaaatcaaac

SEQ ID NO: 7850 - DNA, 322 bp, Homo sapiens
gacatccagatgacccagtctccatcctccctgtctgcatctgtaggagacagagtcaccatcacttgccaggcgagtcaggacattagaaactatttaaattggtatcagcagaaaccagggaaagcccctaagctcctgatctacgatgcatccaatttggaaacaggggtcccatcgaggttcagtggaagtggatctgggacagattttactttcaccatcagcagcctgcagcctgaagatattgcaacatattattgtcaacagtatgataatctcccgtacacttttggccgggggaccaagctggagatcaaac

SEQ ID NO: 7851 - DNA, 328 bp, Homo sapiens
gaaattgtgttgacacagtctccagccaccctgtctttgtctccaggggaaagagccaccctctcctgcagggccagtcagagtgttggcagctacttagcctggtaccaacacaaacctggccaggctcccaggctcctcatctatgatgcatccaacagggccactggcatcccagccaggttcagtggcagtgggtctgggacagacttcactctcaccatcagcagcctagagcctgaagattttgcagtttattactgtcaccagcgtcgcaactggcctccgaggatcaccttcggccaagggacacgactggagattaaac

SEQ ID NO: 7852 - DNA, 328 bp, Homo sapiens
gaaattgtgttgacacagtctccagccaccctgtctttgtctccaggggaaagagccactctctcctgcagggccagtcagagtcttagcaactacttagcctggtaccaacagaaacctggccaggctcccaggctcctcatctatgatgcatccaacagggccactggcatcccagccaggttcagtggcagtgggtctgggacagacttcactctcaccatcagcagcctagagcctgaagattttgcagtttattactgtcagcagcgtagcaactggcctccgaggtacacttttggccaggggaccaagctggagatcaaac

SEQ ID NO: 7853 - DNA, 340 bp, Homo sapiens
gacatcgtgatgacccagtctccagactccctggctgtgtctctgggcgagagggccaccatcaactgcaagtccagccagagtgttttatacagctccaacaataagaactacttagcttggtaccagcagaaaccaggacagcctcctaagctgctcatttactgggcatctacccgggaatccggggtccctgaccgattcagtggcagcgggtctgggacagatttcactctcaccatcagcagcctgcaggctgaagatgtggcagtttattactgtcagcaatattatagtacaccgtacacttttggccaggggaccaagctggagatcaaac

SEQ ID NO: 7854 - DNA, 325 bp, Homo sapiens
gaaattgtgttgacacagtctccagccaccctgtctttgtctccagggcaaagagccaccctctcctgcagggccagtcagagtgttagcagctacttagcctggtaccaacagaaatttggccaggctcccaggctcctcatctatgatgcatccaacagggccactggcatcccagccaggttcagtggcagtgggtctgggacagacttcactctcaccatcagcagcctagagcctgaagattttgcagtttattactgtcagcagcgtagcaactggcctgggatcaccttcggccaagggacacgactggagattaaac

SEQ ID NO: 7855 - DNA, 337 bp, Homo sapiens
gatattgtgatgactcagtctccactatccctgcccgtcacccctggagagccggcctccatcacctgcaggtctagtcagagcctcctgcataggaatggatacaactatttggattggtacctgcagaagccagggcagtctccacagctcctgatctatttggtttctagtcgggcctccggggtccctgacaggttcagtggcagtggatcaggcacagattttacactgaaaatcagcagagtggaggctgaggatgttggggtttattactgcatgcaaactctacaaactccgtggacgttcggccaagggaccacggtggaaatcaaac

SEQ ID NO: 7856 - DNA, 334 bp, Homo sapiens
cagtctgccctgactcagcctcgctcagtgtccgggtctcctggacagtcagtcaccatctcctgcactggaaccagcagtgatgttggtggttataactatgtctcctggtaccaacagcacccaggcaaagcccccaaattcatgatttatgatgtcagtaagcggccctcaggggtccctgatcgcttctctggctccaagtctggcaacacggcctccctgaccatctctgggctccaggctgaggatgaggctgattattactgctgcgcatatgcaggcagctacactctttgggtgttcggcggagggaccaagctgaccgtcctag

SEQ ID NO: 7857 - DNA, 325 bp, Homo sapiens
gaaattgtgttgacgcagtctccaggcaccctgtctttgtctccaggggaaagagccaccctctcctgcagggccagtcagagtgttagcagcagctacttagcctggtaccagcagaaacctggccaggctcccaggctcctcatctatggtgcatccagcagggccactggcatcccagacaggttcagtggcagtgggtctgggacagacttcactctcaccatcagcagactggagcctgaagattttgcagtgtattactgtcagcagtatggtagctcatcgcggacgttcggccaagggaccaaggtggaaatcaaac

SEQ ID NO: 7858 - DNA, 322 bp, Homo sapiens; identical to SEQ ID NO: 837

SEQ ID NO: 7859 - DNA, 322 bp, Homo sapiens
gacatccagatgacccagtctccttccaccctgtctgcatctgtaggagacagagtcaccatcacttgccgggccagtcagagtattggtagctggttggcctggtatcagcggaaaccagggaaagcccctaacctcctgatctataaggcgtctagtttagaaagtggggtcccatcaaggttcagcggcagtggatctgggacagaattcactctcaccatcagcagcctgcagcctgatgattttgcaacttattactgccaacagtatgatagttacccgtacacttttggccaggggaccaagctggagatcaaac

SEQ ID NO: 7860 - DNA, 322 bp, Homo sapiens
gacatccagatgacccagtctccatcctccctgtctgcgtctgtaggagacagagtcaccatcacttgccgggcaagtcagagcattcgcagctatttaagttggtatcagcagaaaccagggaaagcccctaagctcctgatctatgctgcatccagtttgcaaagtggggtcccatcaaggttcagtggcagtggatctgggacagatttcactctcaccatcagcagtctgcaacctgaagattttgcaacttactactgtcaacagagttacagttcctcctggacgttcggccaagggacccaggtggaaatcaaac

SEQ ID NO: 7861 - DNA, 331 bp, Homo sapiens
cagtctgtgttgacgcagccgccctcagtgtctgcggccccaggacagaaggtcaccatctcctgctctggaagcagctccaacattgggaataattatgtatcctggtaccagcagctcccaggaacagcccccaaattcctcatttatgacaataataagcgaccctcagggattcctgaccgattctctggctccaagtctggcacgtcagccaccctgggcatcaccggactccagactggggacgaggccgattattactgcggaacatgggatagcagcctgagtgctgtggtattcggcggagggaccaagctgaccgtcctag

SEQ ID NO: 7862 - DNA, 331 bp, Homo sapiens
cagtctgtgctgactcagccaccctcagcgtctgggacccccgggcagagggtcaccatctcttgttctggaagcagctccaacatcggaagtaattatgtatactggtaccagcagctcccaggaacggcccccaaactcctcatctataggaataatcagcggccctcaggggtccctgaccgattctctggctccaagtctggcacctcagcctccctggccatcagtgggctccggtccgaggatgaggctgattattactgtgcagcatgggatgacagcctgagtggtccgttattcggcggagggaccaagctgaccgtcctag

SEQ ID NO: 7863 - DNA, 346 bp, Homo sapiens
caggctgtgctgactcagccgtcttccctctctgcatctcctggagcatcagccagtctcacctgcaccttacgcagtggcatcaatgttggtacctacaggatatactggtaccagcagaagccagggagtcctccccagtatctcctgaggtacaaatcagactcagataagcagcagggctctggagtccccagccgcttctctggatccaaagatgcttcggccaatgcagggattttactcatctctgggctccagtctgaggatgaggctgactattactgtatgatttggcacagcagcgcttgggtgttcggcggagggaccaagctgaccgtcctag

SEQ ID NO: 7864 - DNA, 325 bp, Homo sapiens
gacatccagatgacccagtctccatcctccctgtctgcatctgtaggagacagagtcaccatcacttgccgggcgagtcagggcattagcaattttttagcctggtatcagcagaaaccagggaaagttcctaagctcctgatctatgctgcatccattttgctgtcaggggtcccgtctcggttcagtggcagtggatctgggacagatttcactctcaccatcagcagcctgctgcctgaagatgtggcaacttattactgtcaaaaatatgacagtgccccgggagtcactttcggccctgggaccaaagtggatatcaaac

SEQ ID NO: 7865 - DNA, 334 bp, Homo sapiens
cagtctgtgctgacgcagccgccctcagtgtctggggccccagggcagagggtcaccatctcctgcactgggagcagctccaacatcggggcaggttatgatgtacactggtaccagaagcttccaggaacagcccccaaactcctcatctatggtaacagcaatcggccctcaggggtccctgaccgattctctggctccaagtctgccacctcaccctccctggccatcactgggctccaggctgaggatgaggctgattattattgtcagtcctatgacagcagcctgagggatgtggtattcggcggagggaccaagctgaccgtcctag

SEQ ID NO: 7866 - DNA, 319 bp, Homo sapiens
tcctatgagctgactcagccaccctcagtgtccgtgtccccaggacagacagccagcatcacctgctctggagataaattgggggataaatatgcttgctggtatcagcagaagccaggccagtcccctgtgctggtcatctatcaagatagcaagcggccctcagggatccctgagcgattctctggctccaactctgggaacacagccactctgaccatcagcgggacccaggctatggatgaggctgactattactgtcaggcgtgggacagcagctatgtggtattcggcggagggaccaagctgaccgtcctag

SEQ ID NO: 7867 - DNA, 334 bp, Homo sapiens
cagtctgtgctgacgcagccgccctcagtgtctggggccccagggcagagggtcaccatctcctgcactgggagcagctccaacatcggggcaggttatgatgtacactggtaccagcaggttccaggaacagcccccaaactcctcatctatggtaacagcaatcggccctcaggggtccctgaccgattctctggctccaagtctggcacctcagcctccctggccatcactgggctccaggctgaggatgaggctgattattactgccagtcctatgacatcagcctgagtgccgctgtgttcggaggaggcacccagctgaccgtcctcg

SEQ ID NO: 7868 - DNA, 322 bp, Homo sapiens
gacatccagatgacccagtctccttccaccctgtctgcatctgtaggagacagagtcaccatcacttgccgggccagtcagagtattagtagctggttggcctggtatcagcagaaaccagggaaagcccctaagctcctgatctataaggcgtctagtttacaaagtggggtcccatcaaggttcagcggcagtggatctgggacagaattcactctcaccatcagcagcctgcagcctgatgattttgcaacttattactgccaacagtataatagttattcgatcaccttcggccaagggacacgactggagattaaac

SEQ ID NO: 7869 - DNA, 325 bp, Homo sapiens
tcctatgagctgactcagccaccctcagtgtccgtgtccccaggacagacagccagcatcacctgctctggagataaattgggggataaatatgcttgctggtatcagcagaagccaggccagtcccctgtgctggtcatctatcaagatagcaagcggccctcagggatccctgagcgattctctggctccaactctgggaacacagccactctgaccatcagcgggacccaggctatggatgaggctgactattactgtcaggcgtgggacagcagcactgcctcttatgtcttcggaactgggaccaaggtcaccgtcctag

SEQ ID NO: 7870 - DNA, 325 bp, Homo sapiens
gacatccagatgacccagtctccatcctccctgtctgcatctgtaggagacagagtcaccatcacttgccgggcaagtcagcgcattagcagctatttaaattggtatcagcagaaaccagggaaagcccctaagctcctgatctatgctgcatccagtttgcaaagtggggtcccatcaaggttcagtggcagtggatctgggacagatttcactctcaccatcagcagtctgcaacctgaagattttgcaacttactactgtcaacagagttacattatgcctccgtggacgttcggcctagggaccaaggtggaaatcaaac

SEQ ID NO: 7871 - DNA, 337 bp, Homo sapiens
gacatcgtgatgacccagtctccagactccctggctgtgtctctgggcgagagggccaccatcaactgcaagtccagccagagtgttctatacagccccaacaataagaactacttagcttggtaccagcagaaaccaggacagcctcctaagctgctcatttactgggcatctacccgggaatccggggtccctgaccgattcagtggcagcgggtctgggacagatttctctctcaccatcagcagcctgcaggctgaagatgtggcagtttattactgtcagcaatattatagtactccctccttcggccctgggaccacagtggatatcaaac

SEQ ID NO: 7872 - DNA, 322 bp, Homo sapiens
gacatccagatgacccagtctccatcctcactgtctgcatctgtcggagacagagtcaccatctcttgtcgggcgagtcagggcattaccaattatttagcctggtttcagcagaaaccagggaaagcccctaggtccctgatctatgctgcatccagtttgcaaagtggggtcccatcaaagttcagcggcagtggatctgggacagatttcactctcaccatcagcagcctgcagactgaagattttgcaacttattactgccaacactataatagttaccccctcactttcggcggagggaccaaggtggagatcaaac

SEQ ID NO: 7873 - DNA, 322 bp, Homo sapiens
gaaattgtgttgacacagtctccagccaccctgtctttgtctccaggggaaagagccaccctctcctgcagggccagtcagagtgttaggagctacttagcctggtaccaacagaaacctggccaggctcccaggctcctcatctatgatgcatccaacagggccactggcatcccagccaggttcagtggcagtgggtctgggacagacttcactctcaccatcagcagcctagagcctgaagattttgcagtttattactgtcagcagcgtaacatctggcctctcactttcggcggagggaccaaggtggagatcaaac

SEQ ID NO: 7874 - DNA, 325 bp, Homo sapiens
cagtctgccctgactcagcctcgctcagtgtccgggtctcctggacagtcagtcaccatctcctgcactggaaccagcagtgatgttggtggttataactttgtctcctggtaccaacagcacccaggcaaagcccccaaactcataatttatgatgtcagtgagcggccctcaggggtccctgatcgcttctctggctccaagtctggcagcacggcctccctgaccatctctgggctccaggctaaagatgaggctgattattactgctgctcatatgcaggcagctacactttcggaactgggaccaaggtctccgtcctag

SEQ ID NO: 7875 - DNA, 337 bp, Homo sapiens
gatattgtgatgactcagtctccactctccctgcccgtcacccctggagagccggcctccatctcctgcaggtctagtcagagcctcctgcatagtaatggatacaactatttggattggtacctgcagaagccagggcagtctccacagctcctgatctatttgggttctaatcgggcctccggggtccctgacaggttcagtggcagtggatcaggcacagattttacactgaaaatcagcagagtggagactgaggatgttggggtttattactgcatgcaagctctacaaaccccgatcaccttcggccaagggacacgactggagattaaac

SEQ ID NO: 7876 - DNA, 322 bp, Homo sapiens
gacatccagatgacccagtctccatcctccctgtctgcatctgtaggagacagagtcaccatcacttgccgggcaagtcagagtattagtagttatttaaattggtatcagcagaaaccagggaaagcccctaaactcctgatctatgctgcatccagtttgcaaagtggggtcccatcaaggttcagtggcagtggatctgggacagatttcacactcaccatcagcagtctgcaacctgaagattttgcaacttactactgtcaacagagttacagtacccccttcactttcggccctgggaccaaagtggatatcaaac

SEQ ID NO: 7877 - DNA, 331 bp, Homo sapiens
cagactgtggtgacccaggagccatcgttctcagtgtcccctggagggacagtcacactcacttgtggcttgagctctggctcagtctctactagttactaccccagctggtaccagcagaccccaggccaggctccacgcacgctcatctacagcacaaatactcgctcttctggggtccctgatcgcttctctggctccatccttgggaacagagctgccctcaccatcacgggggcccaggcagatgatgaatctgattattactgtgtgctctatatggctggtggcctaagggtgttcggcggagggaccaagctgaccgtcctag

SEQ ID NO: 7878 - DNA, 319 bp, Homo sapiens; identical to SEQ ID NO: 1688

SEQ ID NO: 7879 - DNA, 334 bp, Homo sapiens
cagtctgtgctgacgcagccgccctcagtgtctggggccccagggcagagggtcaccatctcctgcactgggagcagctccaacatcggggcaggttatgatgtacactggtaccagcagcttccaggaacagcccccaaactccgcatctatggtaacagcaatcggccctcaggggtccctgaccgattctctggctccaagtctggcacctcagcctccctggccatcactgggctccaggctgaggatgaggctgattattactgccagtcctatgacagcagcctgagtggttatgtcttcggaactgggaccaaggtcaccgtcctag

SEQ ID NO: 7880 - DNA, 331 bp, Homo sapiens
tcctatgtgctgactcagccaccctcagtgtcagtggccccaggaaagacggccaggattacctgtgggggaaacaacattggaagtaaaagtgtgcactggtaccagcagaagccaggccaggcccctgtgctggtcctctattatgatagcgaccggccctcagggatccctgagcgattctctggctccaactctgggaacacggccaccctgaccatcagcagggtcgaagccggggatgaggccgactattactgtcaggtgtgggatagtagtggtgatcatcccaattgggtgttcggcggagggaccaagctgaccgtcctag

SEQ ID NO: 7881 - DNA, 325 bp, Homo sapiens
tcttctgagctgactcaggaccctgctgtgtctgtggccttgggacagacagtcaggatcacatgccaaggagacagcctcagaaactattatgcaagctggtaccagcagaagccaggacaggcccctctacttgtcctctatggtaacaacaaccggccctcagggatcccagaccgattctctggctccagctcaggaaacacagcttccttgaccatcactggggctcaggcggaggatggggctgactattactgtaactcccgggacagcagtggtaaccattatgtcttcggaactgggaccaaggtcaccgtcctag

SEQ ID NO: 7882 - DNA, 322 bp, Homo sapiens
gacatccagatgacccagtctccatcctccctgtctgcatctgtaggagacagagtcaccatcacttgccgggcaagtcagagcattagcagctatttaaattggtatcagcagaaaccagggaaagcccctaagctcctgatctatgctgcatccagtttgcaaagtggggtcccatcaaggttcagtggcagtggatctgggacagatttcactctcaccatcagcagtctgcaacctgaagattttgcaacttactactgtcaacagagttacagtacctcgtacacttttggccaggggaccaagctggagatcaaac

SEQ ID NO: 7883 - DNA, 328 bp, Homo sapiens
tcctatgtgctgactcagccaccctcggtgtcggtggccccgggacagacggccacaattacctgtgggggaaacaacattggaagtaaaagtttgcactggtaccagcagaagccaggccaggcccccgtgctggtcgtctatgatgatagcgaccggccctcagggatccctgagcgattctctggctccaactctgggaacccggccaccctgaccatcagcagggtcgaagccggggatgaggccgactattactgtcaggtgtgggatagtagtagtgatcattatgtggtattcggcggagggaccaagctgaccgtcctag

SEQ ID NO: 7884 - DNA, 322 bp, Homo sapiens
gaaattgtgttgacacagtctccagccaccctgtctttgtctccaggggaaagagccaccctctcctgcagggccagtcagagtgttagcagctacttagcctggtaccaacagaaacctggccaggctcccaggctcctcatctatgatgcatccaacagggccactggcatcccagccaggttcagtggcagtgggtctgggacagacttcactctcaccatcagcagcctagagcctgaagattttgcagtttattactgtcagcagcgtagcaactggcctccgactttcggcggagggaccaaggtggagatcaaac

SEQ ID NO: 7885 - DNA, 320 bp, Homo sapiens
gaagttgtgttgacgcagtctccaggcaccctgtctttgtctccaggggaaagagccaccctctcctgcagggccagtcagagtgttaacagcaactacttagcctggtaccagcagaaacctggccaggctcccggactcctcatctctggtgtctctagcagggccagtggcatcccagacaggttcagtggcagtgggtctgggacagacttcactctcaccatcagcagactggagcctgaagattttgcagtgtatttctgtcagcagtatggttcgtcacctactttcggcggagggaccagggtggagatcaa

SEQ ID NO: 7886 - DNA, 331 bp, Homo sapiens
cagtctgccctgactcagcctgcctccgtgtctgggtctcctggacagtcgatcaccatctcctgcactggaaccagcagtgacgttggtggttataactatgtctcctggtaccaacagcacccaggcaaagcccccaaactcatgatttatgatgtcagtaatcggccctcaggggtttctaatcgcttctctggctccaagtctggcaacacggcctccctgaccatctctgggctccaggctgaggacgaggctgattattactgcagctcatatacaagcatcagcacttttgtcttcggaactgggaccaaggtcaccgtcctag

SEQ ID NO: 7887 - DNA, 331 bp, Homo sapiens
cagtctgccctgactcagcctgcctccgtgtctgggtctcctggacagtcgatcaccatctcctgcactggaaccagcagtgacattggtggttataactatgtctcctggtaccaacagcacccaggcaaagcccccaaagtcatgatttatgatgtcactaatcggccctcaggggtttctaatcgtttctctggctccaagtctggcaacacggcctccctgaccatctctgggctccaggctgaggacgaggctgattatcactgcagctcatacacgagcagcagcacttttgtcttcggaactgggaccaaggtcactgtcctag

SEQ ID NO: 7888 - DNA, 322 bp, Homo sapiens; identical to SEQ ID NO: 929

SEQ ID NO: 7889 - DNA, 322 bp, Homo sapiens
gacatccagatgacccagtctccatcctccctgtctgcatctgtaggagacagagtcaccatcacttgccgggcaagtcagagcattagcagctatttaaattggtatcagcagaaaccagggaaagcccctaagctcctgatctatgctgcatccagtttgcaaagtggggtcccatcaaggttcagtggcagtggatctgggacagatttcactctcaccatcagcagtctgcaacctgaagattttgcaacttactactgtcaacagagttacagtaccctcgggacgttcggccaagggaccaaggtggaaatcaaac

SEQ ID NO: 7890 - DNA, 328 bp, Homo sapiens
tcctatgtgctgactcagccaccctcggtgtcagtggccccaggacagacggccaggattacctgtgggggaaacaacattggaagtaaaagtgtgcactggtaccagcagaagccaggccaggcccctgtgctggtcgtctatgatgatagtgaccggccctcagggatccctgagcgattctctggctccaactctgggaacacggccaccctgaccatcaacagggtcgaagccggggatgaggccgactattactgtcaggtgtgggatagtagtattggtcattattatgtcttcggaactgggaccaaggtcaccgtcctag

SEQ ID NO: 7891 - DNA, 322 bp, Homo sapiens
gacatccaaatgacccaatctccttccaccctgtctgtatctgtgggagacagagtcactatcacttgccgggccagtcacactattggtacctggttggcctggtatcagcagaaaccaggtaaagcccctaaactcttgatctatgaggcgtctagtttagaaagtggtgtcccatcaaggttcagcggcagtggatctgggacagaattcactctcaccatcagcagcctgcagcctgatgattttgcaacttattactgccaacaatataatagttattctccgacgttcggccaagggaccaaggtggaaatcaaac

SEQ ID NO: 7892 - DNA, 320 bp, Homo sapiens
gacatccagatgacccagtctccatcctcactgtctgcatctgtaggagacagagtcaccatcacttgtcgggcgagtcagggcattagcaattatttaacctggtttcagcagaaaccagggaaagcccctaagtccctgatctatgctgcatccagtttgcaaagtggggtcccatcaaggttcagcggcagtggatctgggacagatttcactctcaccatcagcagcctgcagcctgaagattttgcaacttattactgccaacagtataatagtttcccgttcactttcggccctgggaccaaagtggatatcaa

SEQ ID NO: 7893 - DNA, 335 bp, Homo sapiens
agtctgtgctgacgcagccgccgtcagtgtctggggccccagggcagagggtcaacatctcctgcactgggagcagctccaacatcggggcaggttatgatgtacactggtaccagcacctaccaggaacagccccccaactcctcatctatggaaacaccaatcggccctcaggggtccctgaccgattctctggctccaggtctggcacctcagcctccctggccatcactggcctccaggctgaggatgaggctgattattactgccagtcctatgaccgcagcctgagtggtccttgggtgttcggcggagggaccaagctgaccgtccta

SEQ ID NO: 7894 - DNA, 327 bp, Homo sapiens
tcttctgagctgactcaggaccctgctgtgtctgtggccttgggacagacagtcaggatcacatgccaaggagacagcctcagaagctattatgcaagctggtaccagcagaagccaggacaggcccctgtacttgtcatctatggtaaaaacaaccggccctcagggatcccagaccgattctctggctccagctcaggaaacacagcttccttgaccatcactggggctcaggcggaagatgaggctgactattactgtaactcccgggacagcagtggtaaccatctcgggtcttcggaactgggaccaaggtcaccgtcctag

SEQ ID NO: 7895 - DNA, 325 bp, Homo sapiens
gacatccagatgacccagtctccatcctccctgtctgcatctgtaggagacagagtcaccatcacttgccgggcaagtcagagcattagcaggtatttaaattggtatcagcagaaaccagggaaagcccctaagctcctgatctatgctgcatccagtttgcaaagtggggtcccatcaaggttcagtggcagtggatctgggacagatttcactctcaccatcagcagtctgcaacctgaagattttgcaatttactactgtcaacagagttacagtacccctccgtggacgttcggccaagggaccaaggtggaaatcaaac

SEQ ID NO: 7896 - DNA, 343 bp, Homo sapiens
gacatcgtgatgacccagtctccagactccctggctgtgtctctgggcgagagggccaccatcaactgcaagtccagccagagtgttttatacagctccaacaataagaactacttagcttggtaccagcagaaaccaggacagcctcctaagctgctcatttactgggcatctacccgggaatccggggtccctgaccgattcagtggcagcgggtctgggacagatttcactctcaccatcagcagcctgcaggctgaagatgtggcagtttattactgtcagcaatattatagtactcttccgatcaccttcggccaagggacacgactggagattaaac

SEQ ID NO: 7897 - DNA, 331 bp, Homo sapiens
gaagttgtgttgacgcagtctccaggcaccctgtctttgtctccaggggaaagagccaccctctcctgcagggccagtcagagtattatcagcaactccttagcctggtaccagcagaaacctggccaggctcccaggctcctcatctctagtgcatccaacagggccgctggcatcccagacaggttcagtggcagtgagtctgggacagacttcactctcaccatcagcagactggagcctgaagattttgcagtgtattactgtcagcagtttggtagctcacctccgccgatcaccttcggccaagggacacgactggaaattaaac

SEQ ID NO: 7898 - DNA, 325 bp, Homo sapiens
tcctatgtgctgactcagccaccctcggtgtcagtggccccaggacagacggccaggattacctgtgggggaagcaacattggaagtaaaagtgtgcactggtaccagcagaagccaggccaggcccctgtgctggtcgtctatgatgatagcgaccggccctcagggatccctgagcgattctctggctccaactctgggaacacggccaccctgaccatcagcagggtcgaagccggggatgaggccgactattactgtcaggtgtgggatactagtagtgatcccgtggtattcggcggagggaccaagctgaccgtcctag

SEQ ID NO: 7899 - DNA, 319 bp, Homo sapiens
tcctatgagctgactcagccaccctcagtgtccgtgtccccaggacagacagccagcatcacctgctctggagataaattgggggaaaaatatgcttgctggtatcagcagaagccaggccagtcccctgtcctggtcatctttcaagataccaagcggccctcagggatccctgagcgattctctggctccaactctgggaacacagccactctgaccatcagcgggacccaggctatggatgaggctgactattactgtcaggcgtgggacagcagcactgcggtgttcggcggagggaccaagctgaccgtcctag

SEQ ID NO: 7900 - DNA, 322 bp, Homo sapiens
gacatccagatgacccagtctccttccaccctgtctgcatctgtaggagacagagtcaccatcacttgccgggccagtcagagtattagtagctggttggcctggtatcagcagaaaccagggaaagcccctaagctcctgatctataaggcgtctagtttagaaagtggggtcccatcaaggttcagcggcagtggatctgggacagaattcactctcaccatcagcagcctgcagcctgatgattttgcaacttattactgccaacagtataatagttatgggctcactttcggcggagggaccaaggtggagatcaaac

SEQ ID NO: 7901 - DNA, 325 bp, Homo sapiens
gacatccagatgacccagtctccatcctccctgtctgcatctgtaggagacagagtcaccatcacttgccgggcaagtcagagcattagcagctatttaaattggtatcagcagaatccagggaaagcccctaagctcctgatctatgctgcatccagtttgcaaagtggggtcccatcgaggttcagtggcagtggatctgggacagatttcactctcaccatcagcagtctgcaacctgaagattttgcaacttactactgtcaacagagttacagtaccctcccgtacacttttggccaggggaccaagctggagatcaaac

SEQ ID NO: 7902 - DNA, 325 bp, Homo sapiens; identical to SEQ ID NO: 4861

SEQ ID NO: 7903 - DNA, 328 bp, Homo sapiens
cagtctgccctgactcagcctcgctcagtgtccgggtctcctggacagtcagtcaccatctcctgcactggaaccagcagtgatgttggtggttataactatgtctcctggtaccaacagcacccaggcaaagcccccaaactcatgatttatgatgtcagtaagcggccctcaggggtccctgatcgcttctctggctccaagtctggcaacacggcctccctgaccatctctgggctccaggctgaggatgaggctgattattactgctgctcatatgcaggcagcttttgggtgttcggcggagggaccaagctgaccgtcctag

SEQ ID NO: 7904 - DNA, 325 bp, Homo sapiens
tcctatgtgctgactcaggcaccctcggtgtcagtggccccaggacagacggccaggattacctgtgggggaaacaacattggaagtaaaggtgtgcactggtaccagcagaagccaggccaggcccctgtgctggtcgtctatgatgatagcgaccggccctcagggatccctgagcgattctctggctccaactctgggaacacggccaccctgaccatcagcagggtcgaagccggggatgaggccgactattactgtcaggtgtgggatagtagtggtgatcatgtggtattcggcggagggaccaagctgaccgtcctag

SEQ ID NO: 7905 - DNA, 322 bp, Homo sapiens
gacatccagatgacccagtctccttccaccctgtctgcatctgtaggagacagagtcaccatcacttgccgggccagtcagagtattagtagctggttggcctggtatcagcagaaaccagggaaagcccctaagctcctgatctataaggcgtctagtttagaaagtggggtcccatcaaggttcagcggcagtggatctgggacagaattcactctcaccatcagcagcctgcagcctgatgattttgcaacttattactgccaacagtataatagttattctcgaacgttcggccaagggaccaaggtggaaatcaaac

SEQ ID NO: 7906 - DNA, 325 bp, Homo sapiens
gacatccagatgacccagtctccatcctccctgtctgcatctgtaggagacagagtcaccatcacttgccgggcaagtcagagtattagcagctatttaaattggtatcagcagaagccagggaaaggccctaagctcctgatctatgctgcatccagtttgcaaagtggggtcccttcaaggttcagtggcagtggatctgggacagatttcactctcaccatcagcagtctgcaacctgaagattttgcaacttactactgtcaacagagttacagtacctccacgtacacttttggccaggggaccaagctggagatcaaac

SEQ ID NO: 7907 - DNA, 322 bp, Homo sapiens
gacatccagatgacccagtctccatcctccctgtctgcatctgtaggagacagagtcaccatcacttgccgggcaagtcagagcattgacaataacttaaattggtatcagcagaaaccagggaaagcccctaagttcctgatctatgctgcatccagtttggaaagtggggtcccatcaaggttcagtggcagtggatctgggacagatttcactctcaccatcagcagtctgcaacctgaagattttgcagcttactactgtcaacagagttacagtaccccgctcactttcggcggagggaccaaggtggagatcaaac

SEQ ID NO: 7908 - DNA, 322 bp, Homo sapiens
gaaattgtgttgacacagtccccagccaccctgtctttgtctccaggggaaagagccaccctctcctgcagggccagtcagagtattagcaccaaaatagcctggtaccagcagaaacctgaccaggttcccaggctcctcatctatgatgcatccaacagggccactggcatcccagccaggttcagtggcagtgggtctgggacagacttcactctcaccatcagcagcctagagtctgaagattttgcagtttattactgtcagcagcgtagcaactggcccctcagtttcggcggagggaccaaggtggagatcaaac

SEQ ID NO: 7909 - DNA, 331 bp, Homo sapiens; identical to SEQ ID NO: 764

SEQ ID NO: 7910 - DNA, 337 bp, Homo sapiens
caggctgtggtgactcaggagccctcactgactgtgtccccaggagggacagtcactctcacctgtggctccagcactggagctgtcaccagtggtcattatccctactggttccagcagaagcctggccaagcccccaggacactgatttatgatacaagcaacaaacactcctggacacctgcccggttctcaggctccctccttgggggcaaagctgccctgaccctttcgggtgcgcagcctgaggatgaggctgaatattactgcttgctctcctatagtggtgctcggctttattgggtgttcggcggagggtccaagctgaccgtcctag

SEQ ID NO: 7911 - DNA, 322 bp, Homo sapiens
gacatccagttgacccagtctccatccttcctgtctgcatctgtaggagacagagtcaccatcacttgccgggccagtcagggcattagcagttatttagcctggtatcagcaaaaaccagggaaagcccctaagctcctgatctatgctgcatccactttgcaaagtggggtcccatcaaggttcagcggcagtggatctgggacagaattcactctcacaatcagcagcctgcagcctgaagattttgcaacttattactgtcaacagcttaatagttaccctctcactttcggcggagggaccaaggtggagatcaaac

SEQ ID NO: 7912 - DNA, 322 bp, Homo sapiens; identical to SEQ ID NO: 1695

SEQ ID NO: 7913 - DNA, 322 bp, Homo sapiens
gacatccagatgacccagtctccatcctccctgtctgcatctgtaggagacagagtcaccatcacttgccgggcaagtcagggcattagaaatgatttaggctggtatcagcagaaaccagggaaagcccctaagcgcctgatctatgctgcatccagtttgcaaagtggggtcccatcaaggttcagcggcagtggatctgggacagaattcactctcacaatcagcagcctgcagcctgaagattttgcaacttattactgtctacagcataatagttacccttggacgttcggccaagggaccaaggtggaaatcaaac

SEQ ID NO: 7914 - DNA, 334 bp, Homo sapiens
cagtctgccctgactcagcctgcctccgtgtctgggtctcctggacagtcgatcaccatctcctgcactggaaccagcagtgacgttggtggttataactatgtctcctggtaccaacagcacccaggcaaagcccccaaactcatgatttatgatgtcagtaatcggccctcaggggtttctaatcgcttctctggctccaagtctggcaacacggcctccctgaccatctctgggctccaggctgaggacgaggctgattattactgcagctcatatacaagcagcagcactctttatgtcttcggaactgggaccaaggtcaccgtcctag

SEQ ID NO: 7915 - DNA, 331 bp, Homo sapiens
cagtctgtgttgacgcagccgccctcagtgtctgcggccccaggacagaaggtcaccatctcctgctctggaagcagctccaacattgggaataatgatgtatcctggtaccagcagctcccaggaacagcccccaaactcctcatttatgacaataataagcgaccctcagggattcctgaccgattctctggctccaagtctggcacgtcagccaccctgggcatcaccggactccagactggggacgaggccgattattactgcggaacatgggatagcagcctgagtgtttatgtcttcggaactgggaccaaggtcaccgtcctag

SEQ ID NO: 7916 - DNA, 328 bp, Homo sapiens
aaattgtgttgacgcagtctccaggcaccctgtctttgtctccaggggaaagagccaccctctcctgcagggccagtcagagtattcgtagtacctacttagtctggtaccaacaaaggcctggccaggctcccaggctcctcatctatggtacatccaggagggccactggcaccccagacaggttcagtggcagtgggtctgggacagacttcactctcaccatcaacagactggagcgcgaagattctgcaatatattactgccagcaatatgaagactcacctcctcggtgcactttcggccaggggaccaagctggagatcaa

SEQ ID NO: 7917 - DNA, 328 bp, Homo sapiens
gaaatagtgatgacgcagtctccagccaccctgtctgtgtctccaggggaaagagccaccctctcctgcagggccagtcagagtgttagcagcaacttagcctggtaccagcagaaacctggccaggctcccaggctcctcatctatggtgcatccaccagggccactggtatcccagccaggttcagtggcagtgggtctgggacagagttcactctcaccatcagcagcctgcagtctgaagattttgcagtttattactgtcagcagtataataactggcctcccatattcactttcggccctgggaccaaagtggatatcaaac

SEQ ID NO: 7918 - DNA, 322 bp, Homo sapiens
gacatccagatgacccagtctccatcctccctgtctgcatctgtaggagaaagagtcaccatcacttgccgggcaagtcagagcattagcagctatttaaattggtatcagcagaaaccagggaaagcccctaagctcctgatctatgctgcatccagtttgcaaagtggggtcccatcaaggttcagtggcagtggatctgggacagatttcactctcaccatcagcagtctgcaacctgaagattttgcaacttactactgtcaacagagttacagaacccctctcacttttggccaggggaccaagctggagatcaaac

SEQ ID NO: 7919 - DNA, 319 bp, Homo sapiens
tcctatgagctgactcagccactctcagtgtcagtggccctgggacagacggccaggattacctgtgggggaaacaacattggaagtaaaagtgtgcactggtaccatcagaagccaggccaggcccctgtgttggtcatctatagggataacaaccggccctctgggatccctgagcgattctctggctccaactcggggaacacggccaccctgagcatcagcagagcccaagccggggatgaggctgactattactgtcaggtgtgggacagcaccgacgtggtattcggcggagggaccaagctgaccgtcctag

SEQ ID NO: 7920 - DNA, 322 bp, Homo sapiens
gacatccagatgacccagtctccatcctccctgtctgcatctgtaggagacagagtcaccatcacttgccgggcaagtcagagcattagcagctatttaaattggtatcagcagagaccagggaaagcccctaagctcctgatctttgctgcatccagtttgcaaagtggggtcccatcaaggttcagtggcagtggatctgggacagatttcactctcaccatcagcagtctgcaacctgaagattttgcaacttactactgtcaacagagttacagtaccacgtggacgttcggccaagggaccaaggtggaaatcaaac

SEQ ID NO: 7921 - DNA, 328 bp, Homo sapiens
tcctatgagctgacacagccaccctcggtgtcagtgtccccaggacagacggccaggatcacctgctctggagatgcattgccaaagcaatatgcttattggtaccagcagaagccaggccaggcccctgtgctggtgatatatgtggacagagagaggccctcagggatccctgagcgattctctggctccagctcagggacaacagtcacgttgaccatcagtggagtccaggcagaagacgaggctgactattactgtcaatcagcagacagcagtggtattcctcaagcggtattcggcggagggaccaagctgaccgtcctag

SEQ ID NO: 7922 - DNA, 322 bp, Homo sapiens
gacatccagatgacccagtctccatcttccgtgtctgcatctgtaggagacagagtcaccatcacttgtcgggcgagtcagggtattagcagctggttagcctggtatcagcaggaaccagggaaagcccctaaactcctgatctatgctgcatccagtttgcaaagtggggtcccatcgaggttcagcggcagtggatctgggacagaattcactctcaccatcagcagcctgcagcctgaagattttgcaacttactattgtcaacaggctaacagtttcccgtacacttttggccaggggaccaagctggagatcaaac

SEQ ID NO: 7923 - DNA, 322 bp, Homo sapiens
gaagttgtgttgacgcagtctccaggcaccctgtctttgtctccaggggaaagagccaccctctcctgcagggccagtcagagtgtcagcagcagctacttagcctggtatcagcagaaacctggccaggctcccaggctcctcatctatggtgcatccagcagggccactggcatcccagacaggttcagtggcagtgggtctgggacagacttcactctcaccatcagcagactggagcctgaagattttgcagtctattactgtcagcagtatggtagctcgtacacttttggccaggggaccaagctggagatcaaac

SEQ ID NO: 7924 - DNA, 325 bp, Homo sapiens
tcctctgagctgacacaaccaccctcggtgtcagtgtccccgggacaaacggccaggatcacctgctctggagatacattgccaaaaaaatatgcttattggtaccagcagaagtcaggccaggcccctgtgctggtcatctatgaggacagcaaacgaccctccgggatccctgagagattctctggctccagctcagggacaatggccaccttgactatcagtggggcccaggtggaggatgaaggtgactactactgttactcaacaggcagcagtggtaatcatagggtattcggcggagggaccaagctgaccgtcctag

SEQ ID NO: 7925 - DNA, 319 bp, Homo sapiens
tcctatgagctgacacagccaccctcggtgtcagtgtccccaggacagacggccaggatcacctgctctggagatgcattgccaaagcaatatgtttattggtaccagcagaagccaggccaggcccctgtgttggtgatatataaagacagtgagaggccctcagggatccctgagcgattctctggctccagttcagggacaacagtcacgttgaccatcagtggagtccaggcagaagatgaggctgactattactgtcaatcagcagacagtagtggtcccttattcggcggagggaccaagctgaccgtcctag

SEQ ID NO: 7926 - DNA, 319 bp, Homo sapiens
tcctatgagctgactcagccaccctcagtgtccgtgtccccaggacagacagccagcatcacctgctctggagataaattgggagataaatatgcttcctggtatcagcagaggccaggccagtcccctctgctggtcatctatcaagataccaagcggccctcagggatccctgagcgattctctggctccaactctgggaacacagccactctgaccatcagcgggacccaggctatggatgaggctgactattactgtcaggcgtgggacagcagcactgtggtattcggcggagggaccaagctgaccgtcctag

SEQ ID NO: 7927 - DNA, 322 bp, Homo sapiens
gaaattgtgttgacgcagtctccaggcaccctgtctttgtctccaggggaaagagccaccctctcctgcagggccagtcagagtgttagcagcagctacttagcctggtaccagcagaaacctggccaggctcccaggctcctcatctatggtgcatccagcagggccactggcatcccagacaggttcagtggcagtgggtctgggacagacttcactctcaccatcagcagactggagcctgaagattttgcagtgtattactgtcagcagtatggtagctcgttcactttcggccctgggaccaaagtggatatcaaac

SEQ ID NO: 7928 - DNA, 319 bp, Homo sapiens
tcctatgagctgactcagccaccctcagtgtccgtgtccccaggacagacagccagcatcacctgctctggagataagttgggggataaatatgcttgctggtatcagcagaagccaggccagtcccctgtgctggtcatctatcaagatagcaagcggccctcagggatccctgagcgattctctggctccaactctgggaacacagccactctgaccatcagcgggacccaggctatggatgaggctgactattactgtcaggcgtgggacagcagcactgtggtattcggcggagggaccaagctgaccgtcctag

SEQ ID NO: 7929 - DNA, 319 bp, Homo sapiens
tccgatgagctgacacagccaccctcggtgtcagtgtccccaggacaaacggccaggatcacctgctctggagatgcattgccaaaaaaatatgcttattggtaccagcagaagtcaggccaggcccctgtgctggtcatctatgaggacagcaaacgaccctccgggatccctgagagattctctggctccagctcagggacaatggccaccttgactatcagtggggcccaggtggaggatgaagctgactactactgttactcaacagacagcagtggtgtggtattcggcggagggaccatgctgaccgtcctag

SEQ ID NO: 7930 - DNA, 319 bp, Homo sapiens
tcctatgagctgactcagccaccctcagtgtccgtgtccccaggacagacagccagcatcacctgctctggagataaattgggggacaaatatgcttgttggtatcagcagaagccaggccagtcccctgtgctggtcatctatcaagatagcaagcggccctcagggatccctgagcgattctctggctccaactctgggaacacagccactctgaccatcagcgggacccaggctttggatgaggctgactattactgtcaggcgtgggacagtagcgccgtggtattcggcggagggaccaagctgaccgtcctag

SEQ ID NO: 7931 - DNA, 337 bp, Homo sapiens
gatattgtgatgacccagactccactctcctcacctgtcacccttggacagccggcctccatctcctgcaggtctagtcaaagcctcgtacacagtgatggaaacacctacttgagttggcttcagcagaggccaggccagcctccaagactcctaatttataagatttctaaccggttctctggggtcccagacagattcagtggcagtggggcagggacagatttcacactgaaaatcagcagggtggaagctgaggatgtcggggtttattactgcatgcaagctacacaatttccgtggacgttcggccaagggaccaaggtggaaatcaaac

SEQ ID NO: 7932 - DNA, 328 bp, Homo sapiens
tcctatgagctgacacagccaccctcggtgtcagtgtccccaggacaaacggccaggatcacctgctctggagatgcattgccaaaaaaatatggttattggtaccagcagaagtcaggccaggcccctgtgttggtcatctatgaggacagcaaacgaccctccgggatccctgagagattctctggctccagctcagggacaatggccaccttgactatcagtggggcccaggtggaggatgaagctgactactactgttactcaacagacagcagtggtcatcatagaggggtattcggcggagggaccaagctgaccgtcctag

SEQ ID NO: 7933 - DNA, 322 bp, Homo sapiens; identical to SEQ ID NO: 2360

SEQ ID NO: 7934 - DNA, 334 bp, Homo sapiens
cagtctgccctgactcagcctgcctccgtgtctgggtctcctggacagtcgatcaccatctcctgcactggaaccagcagtgacgttggtggttataactatgtctcctggtaccaacagcacccaggcaaagcccccaaactcatgatttatgatgtcagtaatcggccctcaggggtttctaatcgcttctctggctccaagtctggcaacacggcctccctgaccatctctgggctccaggctgaggacgaggctgattattactgcagctcatatacaagcagcagcactctctttgtcttcggaactgggaccaaggtcaccgtcctag

SEQ ID NO: 7935 - DNA, 331 bp, Homo sapiens
tcctatgtgctgactcagccaccctcggtgtcagtggccccaggacagacggccaggattacctgtggggaaaacaacattggaagtaaaagtgtgcactggtaccagcagaagccaggccaggcccctgtgctggtcgtctatgatgatagcgaccggccctcagggatccctgagcgattctctggctccaactctgggaacacggccaccctgaccatcagcggggtcgaagccggggatgaggccgactattactgtcaggtgtggggtagtagtagtgatcatccaggggtggtattcggcggagggaccaagctgaccgtcctag

SEQ ID NO: 7936 - DNA, 322 bp, Homo sapiens
gacatccagatgacccagtctccatcctccctgtctgcatctgtaggagacagagtcaccatcacttgccgggcaagtcagagcattagcagctatttaaattggtatcagcagaaaccagggaaagcccctaagctcctgatctatgctgcatccagtttgcaaagtggggtcccatcaaggttcagtggcagtggatctgggacagatttcactctcaccatcagcagtctgcaacctgaagattttgcaacttactactgtcaacagagttacagtaccccttacacttttggccaggggaccaagctggagatcaaac

SEQ ID NO: 7937 - DNA, 319 bp, Homo sapiens
gacatccagatgacccagtctccatcctccctgtctgcatctgtaggagacagagtcaccatcacttgccgggcaagtcagagcattagcagctatttaaattggtatcagcagaaaccagggaaagcccctaagctcctgatctatgctgcatccagtttgcaaagtggggtcccatcaaggttcagtggcagtggatctgggacagatttcactctcaccatcagcagtctgcaacctgaagattttgcaacttactactgtcaacagagttacagtaccttcactttcggccctgggaccaaagtggatatcaaac

SEQ ID NO: 7938 - DNA, 325 bp, Homo sapiens
gaaatagtgttgacgcagtctccaggcaccctgtctttgtctccaggggaaagagccaccctctcctgcagggccagtcagagtgttagcagcaactacttagggtggtaccagcagaaacctggccaggcgcccaggcttctcatctatggtgtatccagcagggccactggcatcccagacaggttcagtggcagtgggtctgggacagacttcactctcaccatcagcagactggagcctgaagattttgcagtgtattactgtcagcagtatggtagctcacgttacacttttggccaggggaccaagctggagatcaaac

SEQ ID NO: 7939 - DNA, 322 bp, Homo sapiens; identical to SEQ ID NO: 837

SEQ ID NO: 7940 - DNA, 331 bp, Homo sapiens
cagtctgccctgactcagcctcgctcagtgtccgggtctcctggacagtcagtcaccatctcctgcactggaaccagcagtgatgttggtggttataactatgtctcctggtaccaacagcacccaggcaaagcccccaaactcatgatttatgatgtcagtaagcggccctcaggggtccctgatcgcttctctggctccaagtctggcaacacggcctccctgaccatctctgggctccaggctgaggatgaggctgattattactgctgctcatatgcaggcagctactcctgggtgttcggcggagggaccaagctgaccgtcctag

SEQ ID NO: 7941 - DNA, 325 bp, Homo sapiens
gacatccagatgacccagtctccttccaccctgtctgcatctgtcggagacagagtcaccatcacttgccgggccagtcagagttttagtaactggttggcctggtatcagcaaaaaccagggcaagcccctaaactcctgatctataaggcatctactttaaaaagtggggtcccatcaaggttcagcggcagtggatctgggacagaattcactctcaccatcaggaacctgcagcctgatgattctgcaacttattactgccaacagtatagtagttattctccgtggacgttcggccaagggaccaaggtggaaatcaaac

SEQ ID NO: 7942 - DNA, 325 bp, Homo sapiens
gacatccagatgacccagtctccatcctccctgtctgcatctgtaggagacagagtcaccatcacttgccaggcgagtcaggacattagcaactatttaaattggtatcaacaaaaaccagggaaagcccctaagctcctgatcttcgatgcatccaatttggaaacaggggtcccatcaaggttcagtggaagtggatctgggacagattttactttcaccatcagcagcctgcagcctgaagatattgcaacatattactgtcaacagtatgataatctccctccgatcaccttcggccaagggacacgactggagattaaac

SEQ ID NO: 7943 - DNA, 334 bp, Homo sapiens
caggctgtggtgactcaggagccctcactgactgtgtccccaggagggacagtcactctcacctgtggctccagcactggagctgtcaccagtggtcattatccctactggttccagcagaagcctggccaagcccccaggacactgatttatgatacaaggaacaaacactcctggacacctgcccggttctcaggctccctccttgggggcaaagctgccctgaccctttcgggtgcgcagcctgaggatgaggctgagtattactgcttgctctcctatagtggtgctcggctttgggtgttcggcggagggaccaagctgaccgtcctag

SEQ ID NO: 7944 - DNA, 322 bp, Homo sapiens
gacatccagatgacccagtctccatcctccctgtctgcatctgtaggagacagagtcaccatcacttgccaggcgagtcaggacattagcaactatttatattggtatcagcagaaaccagggaaagcccctaagctcctgatctacgatgcatccaatttggaaacaggggtcccatcaaggttcagtggaagtggatctgggacagattttactttcaccatcagcagcctgcagcctgaagatattgcaacatatttctgtcaacagtatgataatctcccgatcaccttcggccaagggacacgactggagattaaac

SEQ ID NO: 7945 - DNA, 334 bp, Homo sapiens
cagtctgccctgactcagcctgcctccgtgtctgggtctcctggacagtcgatcaccatctcctgcactggaaccagcagtgacgttggtggttataactatgtctcctggtaccaacagcacccaggcaaagcccccagactcatgatttatgatgtcagtaatcggccctcaggggtttctaatcgcttctctggctccaagtctggcaacacggcctccctgaccatctctgggctccaggctgaggacgaggctgattattactgcagctcatatacaagcagcagcactctttatgtcttcggaactgggaccaaggtcaccgtcctag

SEQ ID NO: 7946 - DNA, 331 bp, Homo sapiens
cagcctgccctgactcagcctgcctccgtgtctgggtctcctggacagtcgatcaccatctcctgcactggatccagcagggacgttggtggttataactatgtctcctggtaccaacagcacccaggcaaagcccccaaactcatcatttatgatgtcagtaatcggccctcaggggtttctgatcgcttctctggctccaagtctggcaacacggcctccctgaccatctctgggctccaggctgaggacgaggctgactattactgcagctcatatacaagtagaaacactttaatatttggcggagggaccaagctgaccgtcctag

SEQ ID NO: 7947 - DNA, 325 bp, Homo sapiens
gacatccagatgacccagtctccttcctccctgtctgcatctgtaggagacagagtcaccatcacttgccgggcaagtcagagcatttccacctatttaaattggtatcagcagaaaccagggaaagcccctaagctcctgatctatgctgcatccagtttgcaaagtggggtcccatcaaggttcagtggcagtggatctgggacagatttcactctcaccatcagcagtctgcaacctgaagattttgcaacttactactgtcaacagagttacagtaccctctccttgacgttcggccaagggaccaaggtggaaatcaaac

SEQ ID NO: 7948 - DNA, 320 bp, Homo sapiens
gacatccagatgacccagtctccaccctccctgcctgcatctgtaggagacagagtcaccatcacttgccaggcgagtcaggacattagcaactatttaaattggtatcagcagaaactagggaaagcccctaaactcctgatctacgatgcatccaatttggaaacaggggtcccatcaaggttcagtggaagtggatctgggacagattttattttcaccatcagcagcctgcagcctgaagatattgcaacatattactgtcaacagtatgataatctttttcactttcggccctgggaccaaagtgaatatcaaac

SEQ ID NO: 7949 - DNA, 322 bp, Homo sapiens; identical to SEQ ID NO: 4605

SEQ ID NO: 7950 - DNA, 333 bp, Homo sapiens
gatattgtgatgacccagactccactctctctatccgtcacccctagacagccggcctccatctcctgcaagtctagtcagagcctcctgcatagtgatggaaagaccactttgtattgctacctgcagaagcctggccagtctccacagctcctgatttatgaagtttccagccggttctctggggtgccagataggttcagtggcagcgggtcagggacagatttcacactgaaaatcagccgggtggaggctgaggatgttggcgtttattactgaatgcagggcatacaccttcgtcgcgttcggccaagggaccaaggtggaaatcaa

SEQ ID NO: 7951 - DNA, 322 bp, Homo sapiens
gacatccagatgacccagtctccatcctccctgtctgcatctgtaggagacagagtcaccatcacttgccgggcaagtcagagcattagcagctatttaaattggtatcagcagaaaccagggaaagcccctaagctcctgatctatgctgcatccagtttgcaaagtggggtcccatcaaggttcagtggcagtggatctgggacagatttcactctcaccatcagcagtctgcaacctgaagattttgcaacttactactgtcaacagagttacagtaccccttcccttttcggcggagggaccaaggtggagatcaaac

SEQ ID NO: 7952 - DNA, 340 bp, Homo sapiens
gacatcgtgatgacccagtctccagactccctggctgtgtctctgggcgagagggccaccatcaactgcaagtccagccagagtgttttattcagctccaacaaaaagaactacttagcttggtaccagcagaaaccaggacagcctcctaaactgctcatttactggtcatctacccgggaatccggggtccctgaccgattcagtggcagcgggtctgggacagatttcactctcaccatcagcagcctgcaggctgaggatgtggcagtttattactgtcagcaatatgatagtactccgtacacttttggccaggggaccaaggtggagatcaaac

SEQ ID NO: 7953 - DNA, 322 bp, Homo sapiens; identical to SEQ ID NO: 3871

SEQ ID NO: 7954 - DNA, 322 bp, Homo sapiens; identical to SEQ ID NO: 1701

SEQ ID NO: 7955 - DNA, 319 bp, Homo sapiens
tcctatgaactgactcagccaccctcagtgtccgtgtccccaggacagacagccagcatcacctgctctggagatacattgggggataaatatgcttgctggtatcagcagaagccaggccagtcccctgtgctggtcatctatcaagataccaagcggccctcagggatccctgagcgattctctggctccaactctgggaacacagccactctgaccatcagcgggacccaggctatggatgaggctgactattactgtcaggcgtgggacagcagcacttatgtcttcggaactgggaccaaggtcaccgtcctag

SEQ ID NO: 7956 - DNA, 320 bp, Homo sapiens
catccagatgacccagtctccatcgtccctgtctgcctctgtaggagacagagtcaccatcacttgccgggcaagtcagaccattagcacctatttaaattggtatctgcagaaaccagggaaagcccctgagctcctgatctatgctgcatccagtttgcaaagtggggtcccaccaaggttcagtggcagtggatctgggacagaattcactctcaccatcagcagtctgcaacctgaagatttcgcaacttactactgtcaacagagttacagtacgcattggacgttcggccaagggaccaaggtggaaatcaaac

SEQ ID NO: 7957 - DNA, 319 bp, Homo sapiens
gacatccagatgacccagtctccatcctccctgtctgcatctgtaggagacagagtcaccatcacttgccgggcaagtcagagcattagcaactatttaaattggtatcagcagaaaccagggaaagcccctaagctcctgatctatgctgcatccagtttgctaagtggggtcccatcaaggttcagtggcagtggatctgggacagatttcactctcaccatcaccagtctgcaacctgaagattttgcaacttactactgtcaacacagttacagtacccctcgattcggccaagggaccaaggtggaaatcaaac

SEQ ID NO: 7958 - DNA, 317 bp, Homo sapiens
gacatccagatgacccagtctccatcctccctgtctgcatctgtaggagacagagtcaccatcacttgccgggcaagtcagagcattagcagctatttaaattggtatcagcagaaaccagggaaagcccctaagctcctgatctatgctgcatccagtttgcaaagtggggtcccatcaaggttcagtggcagtggatctgggacagatttcactctcaccatcagcagtctgcaacctgaagattttgcaacttactactgtcaacagagttacaatcccctcactttcggtcctgggaccaaagtggatatcaa

SEQ ID NO: 7959 - DNA, 328 bp, Homo sapiens
tcctatgtgctgactcagccaccctcggtgtcagtggccccaggacagacggccaggattacctgtgggggaaacaacattggaagtaaaaatgtgcactggtaccagcagaagccaggccaggcccctgtgctggtcgtctatgatgatagcgaccggccctcagggatccctgagcgattctctggctccaactctgggaacacggccaccctgaccatcagcagggtcgaacccggggatgaggccgactattactgtcacgtgtgggacagtagtggtgatcctttttatgtcttcgggactgggaccaaggtcaccgtcctag

SEQ ID NO: 7960 - DNA, 329 bp, Homo sapiens
gtctgtgctgactcagccaccctcagcgtctgggacccccgggcagagggtcaccatttcttgttctggaagcagctccaacatcggaagtaatcctgtaaactggtaccagcagctcccaggaacggcccccaaactcctcatctatcttaataatcagcggccctcaggggtccctgaccgattctctggctccaagtctggcacctcagcctccctggccatcagtgggctccagtctgaggatgaggctgattattactgtgcagcatgggatgacagcctgaatggtctactattcggcggagggaccaagctgaccgtcctag

SEQ ID NO: 7961 - DNA, 322 bp, Homo sapiens
gacatccagatgacccagtctccatcctccctgtctgcatctgtaggagacagagtcaccatcacttgccaggcgagtcaggacattaacaagtatttaaattggtatcagcagaaatcagggaaagcccctaagctcctgatctacgatgcatccaatttggaaacaggggtcccatcaaggttcagtggaggtggatctgggacagattttactttcaccatcagcagcctgcagcctgaagatattgcaacatattactgtcatcagtctgataatctcccgtacacttttggccaggggaccaagctggagatcaaac

SEQ ID NO: 7962 - DNA, 325 bp, Homo sapiens; identical to SEQ ID NO: 4709

SEQ ID NO: 7963 - DNA, 337 bp, Homo sapiens
cagtctgccctgactcagcctgcctccgtgtctgggtctcctggacagtcgatcaccatctcctgcactggaaccagcagtgacattggtgcttataactatgtctcctggtaccaacagcacccaggcaaagcccccaaactcatgatttatgatgtcaataatcggccctcaggggtttctaatcgcttctctggctccaagtctggcaacacggcctccctgaccatctctgggctccaggctgaggacgaggctgattattactgcagctcatatacaagtagcagcgctctccatgtgctattcggcggagggaccaagctgaccgtcctag

SEQ ID NO: 7964 - DNA, 334 bp, Homo sapiens
cagtctgtgttgacgcagccgccctcagtgtctgcggccccaggacagaaggtcaccatctcctgctctggaagcagctccaacattgggaataattatgtatcctggtaccagcagctcccaggaacagcccccaaactcctcatttatgacaataataagcgaccctcagggattcctgaccgattctctggctccaagtctggcacgtcagccaccctgggcatcaccggactccagactggggacgaggccgattattactgcggaacatgggatagcagcctgagtgcctttgtggtattcggcggagggaccaagctgaccgtcctag

SEQ ID NO: 7965 - DNA, 325 bp, Homo sapiens
gaaattgtgttgacgcagtctccaggcaccctgtctttgtctccaggggaaagagccaccctctcctgcagggccagtcagagtgttagcagcagctacttagcctggtaccagcagaaacctggccaggctcccaggctcctcatctatggtgcatccagcagggccactggcatcccagacaggttcagtggcagtgggtctgggacagacttcactctcaccatcagcagactggagcctgaagattttgcagtgtattactgtcagcagtatggtagctcaccgggcaccttcggccaagggacacgactggagattaaac

SEQ ID NO: 7966 - DNA, 334 bp, Homo sapiens
cagtctgccctgactcagcctgcctccgtgtctgggtctcctggacagtcgatcaccatctcctgcactggaaccagcagtgatgttgggagttataaccttgtctcctggtaccaacagcacccaggcaaagcccccaaactcatgatttatgaggtcagtaagcggccctcaggggtttctaatcgcttctctggctccaagtctggcaacacggcctccctgacaatctctgggctccaggctgaggacgaggctgattattattgctgctcatatgcaggtagcagcactttcgtggtattcggcggagggaccaagctgaccgtcctag

SEQ ID NO: 7967 - DNA, 322 bp, Homo sapiens; identical to SEQ ID NO: 837

SEQ ID NO: 7968 - DNA, 325 bp, Homo sapiens
gacatccagatgacccagtctccatcctccctgtctgcatctgtaggagacagagtcaccatcacttgccgggcaagtcagagcattagcaactatttaaattggtatcagcagaaaccagggaaagcccctaagctcctgatctatgctgcatccagtttgcaaagcggggtcccatcaaggttcagtggcagtggatctgggacagatttcactctcaccatcagcagtctgcaacctgaagattttgcaacttactactgtcaacagagttacagtacccttacgtggacgttcggccaagggaccaaggtggaaatcaaac

SEQ ID NO: 7969 - DNA, 331 bp, Homo sapiens
cagtctgccctgactcagcctgcctccgtgtctgggtctcctggacagtcgatcaccatctcctgcactggaaccagcagtgacgttggtggttataactatgtctcctggtaccaacaacacccaggcaaagcccccaaactcatgatttatgatgtcactaatcggccctcaggggtttctaatcgcttctctggctccaagtctggcaacacggcctccctgaccatctctgggctccaggctgaggacgaggctgattattactgcagctcatatacaagcagcagcactctcgtattcggcggagggaccaagctgaccgtcctag

SEQ ID NO: 7970 - DNA, 331 bp, Homo sapiens
cagtctgtgctgactcagccaccctcggtgtctgaagcccccaggcagagggtcaccatctcctgttctggaagcagctccaacatcggaaataatgctgtaaactggtaccagcagctcccaggaaaggctcccaaactcctcatctattatgatgatctgctgccctcaggggtctctgaccgattctctggctccaagtctggcacctcagcctccctggccatcagtgggctccagtctgaggatgaggctgattattactgtgcagtatgggatgacagcctgaatggttatgtcttcggaactgggaccaaggtcaccgtcctag

SEQ ID NO: 7971 - DNA, 331 bp, Homo sapiens
cagtctgccctgactcagcctgcctccgtgtctgggtctcctggacagtcgatcaccatctcctgcactggaaccagcagtgacgttggtgcttataattatgtctcctggtaccaacaacacccaggcaaagcccccaaactcatgatttatgatgtcagtaatcggccctcaggggtttctaatcgcttctctggctccaagtctggcaacacggcctccctgaccatctctgggctccaggctgaggacgaggctgattattactgcacctcgtggacaagtagtaacacttgggtgttcggcggagggaccaagctgaccgtcctag

SEQ ID NO: 7972 - DNA, 322 bp, Homo sapiens; identical to SEQ ID NO: 4807

SEQ ID NO: 7973 - DNA, 322 bp, Homo sapiens
gacatccagatgacccagtctccatcctccctgtctgcatctgtaggagacagagtcaccatcacttgccgggcaagtcagagcattagcagctatttaaattggtatcagcagaaaccagggaaagcccctaagctcctgatctatgctgcatccagtttgcaaagtggggtcccatcaaggttcagtggcagtggatctgggacagatttcactctcaccatcagcagtctgcaacctgaagattttgcaacttactactgtcaacagagttacagtacccctttcactttcggcggagggaccaaggtggagatcaaac

SEQ ID NO: 7974 - DNA, 320 bp, Homo sapiens
gacatccagatgacccagtctccctccaccctgtctgcatatataggagacagagtcaccatcacttgccgggccagtcagagtattagcatgtggttggcctggtatcagcagaaaccagggaaagcccctaacctcctgatccgtaaggcgtctagtttagaaagtggggtcccatcaaggttcagcggcagtggatctgggacagaattcactctcaccatcagtagcctgcagcctgatgattttgcaacttatttctgcctccaatataatacttattcgtggacgttcggccaagggacccgggtggaagtcaa

SEQ ID NO: 7975 - DNA, 332 bp, Homo sapiens
aattttatgctgactcagccccactctgtgtcggagtctccggggaagacggtaaccatctcctgcaccggcagcagtggcagcattgccagcaactatgtgcagtggtaccagcagcgcccgggcagtgcccccaccactgtgatctatgaggataaccaaagaccctctggggtccctgatcggttctctggctccatcgacagctcctccaactctgcctccctcaccatctctggactgaagactgaggacgaggctgactactactgtcagtcttatcatagcagcaaccatgtggtattcggcggagggaccaagctgaccgtcct

SEQ ID NO: 7976 - DNA, 322 bp, Homo sapiens
tcctatgaactgacacagccaccctcggtgtcagtgtccccaggacagacggccaggatcacctgctctggagatgcattgccaaatcagcgttattggtaccagcagaagccaggccaggcccctgtgttggtaatatacaaagacactgagaggccctcagggatccctgagcggttctctggctccagctcagggacaacagtcacgttgaccatcagtggagtccgggcagaagatgaggctgactattactgtcaatcaggggacaggagtggaaccccttatgtcttcggaagtgggaccaaggtcaccgtcctag

SEQ ID NO: 7977 - DNA, 325 bp, Homo sapiens
gagattgtgttgacgcagtctccaggcaccctgtctttgtctccaggggaaagagccaccctctcctgcaggtccagtcagagtgttaccagcagctacttcgcctggtaccagcagaaacctggccaggctcccaggctcctcatctatggtgcatccagcagggccgctggcatcccagacaggttcagtggcagtgggtctgggacagtcttcactctcaccatcagcagactggagcctgaagactttgcagtatattactgtcagcagtatggtagttcagccgtcactttcggcggagggaccaaggtggagatcaaac

SEQ ID NO: 7978 - DNA, 322 bp, Homo sapiens
gacatccagatgacccagtctccatcttccctgtctgcatctgtaggagacagagtcaccatcacttgccgggcaagtcagagcattagcagctatttaaattggtatcagcagaaaccagggaaaacccctaagctcctgatctatgctgcatccagtttccaaagtggggtcccatcaaggttcagtggcagcggatctgggacagatttcactctcaccatcagcagtctgcaacctgaagattttgcaacttactactgtcaacagagttacagaacccccatcaccttcggccaagggacacgactggagattaaac

SEQ ID NO: 7979 - DNA, 328 bp, Homo sapiens
gacatccagatgacccagtctccatcctccctgtctgcatctgtaggagacagagtcaccatcacttgccgggcaagtcagagcattagcagctatttaaattggtatcagcagaaaccagggaaagcccctaagctcctgatctatgctgcatccagtttgcaaagtggggtcccatcaaggttcagtggcagtggatctgggacagatttcactctcaccatcagcagtctgcaacctgaagattttgcaacttactactgtcaacagagttacagtacccctccggggtacacttttggccaggggaccaagctggagatcaaac

SEQ ID NO: 7980 - DNA, 322 bp, Homo sapiens
gacatccagatgacccagtctccatcctcactgtctgcatctgtaggagacagagtcaccatcacttgtcgggcgagtcagggcattagcaattatttagcctggtttcagcagaaaccagggaaagcccctaagtccctgatctatgctgcatccagtttgcatagtggggtcccatcaaagttcagcggcagtggatctgggacagatttcactctcaccatcagcagcctgcagcctgaagattttgcaacctattactgccaacagtataagagttaccctctcactttcggcggagggaccaaggtggagatcaaac

SEQ ID NO: 7981 - DNA, 325 bp, Homo sapiens; identical to SEQ ID NO: 3299

SEQ ID NO: 7982 - DNA, 325 bp, Homo sapiens
tcctatgtgctgactcagccaccctcagtgtcagtggccccaggaaagacggccaggattacctgtgggggaaacaacattggaagtaaaagtgtgcactggtaccagcagaagccaggccaggcccctgtgctggtcatctattatgatagcgaccggccctcagggatccctgagcgattctctggctccaactctgggaacacggccaccctgaccatcagcagggtcgaagccggggatgaggccgactattactgtcaggtgtgggatagtagtagtgatcatccggtgttcggcggagggaccaagctgaccgtcctag

SEQ ID NO: 7983 - DNA, 331 bp, Homo sapiens
cagtctgccctgactcagcctgcctccgtgtctgggtctcctggacagtcgatcaccatctcctgcactggaaccagcagtgatgttgggagttataaccttgtctcctggtaccaacagcacccaggcaaagcccccaaactcatgatttatgaggtcagtaagcggccctcaggggtttctaatcgcttctctggctccaagtctggcaacacggcctccctgacaatctctgggctccaggctgaggacgaggctgattattactgctgctcatatgcaggtagtagcactgtggtattcggcggagggaccaagctgaccgtcctag

SEQ ID NO: 7984 - DNA, 322 bp, Homo sapiens
gacatccagatgacccagtctccatcttctgtgtctgcatctgtaggagacagagtcaccatcacttgtcgggcgagtcagggtattagcagctggttagcctggtatcagcagaaaccagggaaagcccctaagctcctgatctatgctgaatccagtttgcaaagtggggtcccatcaaggttcagcggcagtggatctgggacagatttcacactcactatcagcagcctgcagcctgaagattttgcaacttactattgtcaacagactaacagtttccctctcactttcggcggagggaccaaggtggagatcaaac

SEQ ID NO: 7985 - DNA, 325 bp, Homo sapiens
gccatccggatgacccagtctccatcctcattctctgcatctacaggagacagagtcaccatcacttgtcgggcgagtcagggtattagcagttatttagcctggtatcagcaaaaaccagggaaagcccctaagctcctgatctatgctgcatccactttgcaaagtggggtcccatcaaggttcagcggcagtggatctgggacagatttcactctcaccatcagctgcctgcagtctgaagattttgcaacttattactgtcaacagtattatagttaccctccgctcactttcggcggagggaccaaggtggagatcaaac

SEQ ID NO: 7986 - DNA, 316 bp, Homo sapiens
gaaattgtgttgacacagtctccagccaccctgtctttgtctccaggggaaagagccaccctctcctgcagggccagtcagagtgttagcagctacttagcctggtaccaacagaaacctggccaggctcccaggctcctcatctatgatgcatccaacagggccactggcatcccagccaggttcagtggcagtgggtctgggacagacttcactctcaccatcagcagcctagagcctgaagattttgcagtttattactgtcagcagcgtagcgaattcactttcggccctgggaccaaagtggatatcaaac

SEQ ID NO: 7987 - DNA, 313 bp, Homo sapiens
gaaatagtgatgacgcagtctccagccaccctgtctgtgtctccaggggaaagagccaccctctcctgcagggccagtcagagtgttagcagcaacttagcctggtaccagcagaaacctggccaggctcccaggctcctcatctatggtgcatccaccagggccactggtatcccagccaggttcagtggcagtgggtctgggacagagttcactctcaccatcagcagcctgcagtctgaagattttgcagtttattactgtcagcagtataataactttttcggcggagggaccaaggtggagatcaaac

SEQ ID NO: 7988 - DNA, 328 bp, Homo sapiens
gaaattgtgttgacacagtctccagccaccctgtctttgtctccaggggaaagagccaccctctcctgcagggccagtcagagtgttagcaacttcttagcctggtaccaacagaagcctggccaggctcccagtctcctcatctatgatgcatccaacagggccactggcatcccagccaggttcagtggcagtgggtctgggacagacttcactctcaccatcaacagcctagagcctgaagattttgcagtttattactgtcagcagcgtagcaactggcctcccgcgctcactttcggcggggggaccaaggtggagatcaaac

SEQ ID NO: 7989 - DNA, 325 bp, Homo sapiens
tcctatgtgctgactcagccaccctcagtgtcagtggccccagggaagacggccaagattacctgtgggggaagcaacattggaagtaaaagtgtgcactggtaccagcagaagccaggccaggcccctgtgctggtcatctattatgatagcgaccggccctcagggatccctgagcgattctctggctccaactctgggaacacggccaccctgaccatcagcagggtcgaagccggggatgaggccgactatttctgtcaggtgtgggatagtagtgatgatcatcctgtcttcggaactgggaccaaggtcaccgtcctag

SEQ ID NO: 7990 - DNA, 319 bp, Homo sapiens
tcctatgaggtgactcagccaccctcagtgtccgtgtccccaggacagacagccaacatcacctgctctggaaataaattgggggataaatatgcttgctggtatcagcagaggccaggccagtcccctgtgctggtcatctatcaagacaacaagcggccctcagggatccctgagcgattctctggctccaactctgggaacacagccactctgaccatcagcgggacccaggctatggatgaggctgactattactgtcaggcgtgggacaacagcactgtggtgttcggcggagggaccaagctgaccgtcctag

SEQ ID NO: 7991 - DNA, 322 bp, Homo sapiens
gacatccagatgacccagtctccatcctccctgtctgcatctgtaggagacagagtcaccatcacttgccgggcaagtcagggcattagaaatgatttaggctggtatcagcagaaaccagggaaagcccctaagcgcctgatctatgctgcatccagtttgcaaagtggggtcccatcaaggttcagcggcagtggatctgggacagaattcactctcacaatcagcagcctgcagcctgaagattttgcaacttatttctgtctacagcataatagttacccccccactttcggccctgggaccaaagtcgaaatcaaac

SEQ ID NO: 7992 - DNA, 328 bp, Homo sapiens
gaaattgtgttgacgcagtctccaggcaccctgtctttgtctccaggggaaagagccaccctctcctgcagggccagtcagagtgttagcagcagctacttagcctggtaccagcagaaacctggccaggctcccaggctcctcatctatggtgcatccagcagggccactggcatcccagacaggttcagtggcagtgggtctgggacagacttcactctcaccatcagcagactggagcctgaagattttgcagtgtattactgtcagcagtatggtagctcacgtatgtacacttttggccaggggaccaagctggagatcaaac

SEQ ID NO: 7993 - DNA, 334 bp, Homo sapiens
cagtctgtgctgacgcagccgccctcagtgtctggggccccagggcagagggtcaccatctcctgcactgggagcaactccaacatcggggcaggttatgatgtacactggtaccagcagcttccaggaacagcccccaaactcctcatctatggtaacagcaatcggccctcaggggtccctgaccgattctctggctccaagtctggcacctcagcctccctggccatcactgggctccaggctgaggatgaggctgattattactgccagtcctatgacagcagcctgagtggcgatgtcttcggaactggaaccaaggtcaccgtcctag

SEQ ID NO: 7994 - DNA, 328 bp, Homo sapiens
gaaattgtgttgacacagtctccagccaccctgtctttgtctccaggggaaagagccaccctctcctgcagggccagtcagagtattagcaactacttagtctggtaccaacaaaaacctggccaggctcccagggtcctcatctatgatgcatccaacagggccactggcatcccagccaggttcagtggcagtgggtctgggacagacttcactctcaccatcagcagcctagagcctgaagattttgcagtttattactgtcaccagcgtagcaactggcctcctcggctcactttcggcggagggaccaaggtggagatcaaac

SEQ ID NO: 7995 - DNA, 319 bp, Homo sapiens
gaaatagtgatgacgcagtctccagccaccctgtctgtgtctccaggggaaagagtcaccctctcctgcagggccagtcagagtgttagcagcaacttagcctggtaccagcagaaatctggccaggctcccaggctcctcatctatgatgcatccaccagggccactggtatcccagcccggttcagtggcagtgggtctgggacagagttcactctcaccatcatcagcctgcagtctgaagattttgcagtttattactgtcagcagtataataactggctcactttcggcggagggaccaaggtggagatcaaac

SEQ ID NO: 7996 - DNA, 334 bp, Homo sapiens
cagtctgtgctgacgcagccgccctcagtgtctggggccccagggcagagggtcaccatctcctgcactgggagcagctccaacatcggggcaggttatgatgtacactggtaccggcagcttccaggaacagcccccaaactcctcatctatgataacagcaatcggccctcaggggtccctgaccgattctctggctccaagtctggcacctcagcctccctggccatcactgggctccaggctgaggatgaggctgattattactgccagtcctatgacatcagcctgagtggttcggtattcggcggagggaccaagctgaccgtcctag

SEQ ID NO: 7997 - DNA, 325 bp, Homo sapiens
gaaattgtgttgacgcagtctccaggcaccctgtctttgtctccaggggaaagagccaccctctcctgcagggccagtcagagtgttagcagcaggtccttagcctggtaccagcagaaacctggccaggctcccaggctcctcatctatggtgcatccagcagggccactggcatcccagacaggttcagtggcagtgggtctgggacagacttcactctcaccatcagcagactggagcctgaagattttgcagtgtattactgtcagcagtatggtaactcacagggaactttcggccctgggaccaaagtggatatcaaac

SEQ ID NO: 7998 - DNA, 322 bp, Homo sapiens
gacatccagttgacccagtctccatccttcctgtctgcatctgtaggagacagagtcaccatcacttgccgggccagtcagggcattagcagttatttagcctggtatcagcaaaaaccagggaaagcccctaagctcctgatctatgctgcatccactttgcaaagtggggtcccatcaaggttcagcggcagtggatctgggacagaattcactctcacaatcagcagcctgcagcctgaagattttgcaacttattactgtcaacaccttaatagttactcgtggacgttcggccaagggaccaaggtggaaatcaaac

SEQ ID NO: 7999 - DNA, 328 bp, Homo sapiens
gaaattgtgttgacgcagtctccaggcaccctgtctttgtctccaggggaaagagccaccctctcctgcagggccagtcacagtgttagcagcagctacttagcctggtaccagcagaaacctggccaggctcccaggctcctcatctatgatgcatccagcagggccactggcatcccagacaggttcagtggcagtgggtctgggacagacttcactctcaccatcagcagactggagcctgaagattttgcagtgtattactgtcagcactatggtagctcacccctattcactttcggccctgggaccaaagtggatgtcaaac

SEQ ID NO: 8000 - DNA, 331 bp, Homo sapiens
cagtctgtgctgactcagccaccctcagcgtctgggacccccgggcagagggtcaccatctcttgttctggaagcagctccaacatcggaagtaattatgtatactggtaccagcagctcccaggaacggcccccaaactcctcatctataggaataatcagcggccctcaggggtccctgaccgattctctggctccaagtctggcacctcagcctccctggccatcagtgggctccggtccgaggatgaggctgattattactgtgcagcatgggatgacagcctgagtgctgtggttttcggcggagggaccaaactgaccgtcctag

SEQ ID NO: 8001 - DNA, 337 bp, Homo sapiens
gatattgtgatgactcagtctccgctctccctgcccgtcacccctggagagccggcctccatctcctgcaggtctagtcagggcctcctacatagtaatggatacaactatttggattggtacctgcagaagccagggcagtctccacagctcctgatctatttgggttctaatcgggcctccggggtccctgacaggttcagtggcagtggatcaggcacagattttacactgaaaatcagcagagtggaggctgaggatgttggggtttattactgcatgcaagctctacaaactccgctcactttcggcggagggaccaaggtggagatcaaac

SEQ ID NO: 8002 - DNA, 328 bp, Homo sapiens
gaaattgtgttgacgcagtctccaggcaccctgtctttgtctccaggggaaagagccaccctctcctgcagggccagtcagagtgttatcagcacctacttagcctggtaccagcagaaacctggccaggctcccaggctcctcatctatggtgcatccagcagggccactggcatcccagacaggttcagtggcagtgggtctgggacagacttcactctcaccatcagcagactggagcctgaagattttgcagtgtattactgtcagcagtatggtagctcgaccacgtggacgttcggccaagggaccaaggtggaaatcaaac

SEQ ID NO: 8003 - DNA, 322 bp, Homo sapiens; identical to SEQ ID NO: 3870

SEQ ID NO: 8004 - DNA, 322 bp, Homo sapiens; identical to SEQ ID NO: 7371

SEQ ID NO: 8005 - DNA, 340 bp, Homo sapiens; identical to SEQ ID NO: 905

SEQ ID NO: 8006 - DNA, 322 bp, Homo sapiens
gacatccagatgacccagtctccatcctccctgtctgcatctgtaggagacagagtcaccatcacttgccgggcaagtcagagcattagcagctatttaaattggtatcagcagaaaccagggaaagcccctaagctcctgatctatgctgcatccagtttgcaaagtggggtcccatcaaggttcagtggcagtggatctgggacagatttcactctcaccatcagcagtctgcaacctgaagattttgcaacttactactgtcaacagagttacagtacccctaggacgttcggccaagggaccaaggtggaaatcaaac

SEQ ID NO: 8007 - DNA, 337 bp, Homo sapiens
gatattgtgatgactcagtctccactctccctgcccgtcacccctggagagccggcctccatctcctgcaggtctagtcagagcctcctgcatagtaatggatacaactatttggattggtacctgcagaagccagggcagtctccacagctcctgatctatttgggttctaatcgggcctccggggtccctgacaggttcagtggcagtggatcaggcacagattttacactgaaaatcagcagagtggaggctgaggatgttggggtttattactgcatgcaagctctacaaactcctccaacttttggccaggggaccaagctggagatcaaac

SEQ ID NO: 8008 - DNA, 313 bp, Homo sapiens
gacatccagatgacccagtctccctccaccctgtctgcatctgtcggagacagagtcaccatcacttgccgggccagtgacagtgttagtaactggttggcctggtatcagcagaagccagggaaagcccctaagctcctgatctataaggcgtctagattacaaagtggggtcccatcaaggttcagcggcagtggttctgggacagaattcactctcaccatcagcagcctgcagcctgatgattttgcaacttattactgccagcactatggatacacttttggccaggggaccaagctggagatcaaac

SEQ ID NO: 8009 - DNA, 322 bp, Homo sapiens; identical to SEQ ID NO: 4573

SEQ ID NO: 8010 - DNA, 323 bp, Homo sapiens
gacatccagatgacccagtctccatcctccctgtctgcatctgtaggagacagagtcaccatcacttgccgggcgagtcagggcattagcaattatttagcctggtatcagcagaaaccagggaaagttcctaagctcctgatctatgctgcatccactttgcaatcaggggtcccatctcggttcagtggcagtggatctgggacagatttcactctcaccatcagcagcctgcagcctgaagatgttgcaacttattactgtcaaaagtataacagtgcccctcaagacgttcggccaagggaccaaggtggaaatcaaac

SEQ ID NO: 8011 - DNA, 325 bp, Homo sapiens
tcctatgtgctgactcagccaccctcggtgtcagtggccccaggacagacggccaggattacctgtgggggaaacaacattggaagtaaaaatgtgcactggtaccagcagaagccaggccaggcccctgtgctggtcgtctatgatgatagcgaccggccctcagggatccctgagcgattctctggctccaactctgggaacacggccaccctgaccatcagcagggtcgaagccggggatgaggccgactattactgtcaggtgtgggataatagtagtgatcatctggtattcggcggagggaccaagctgaccgtcctag

SEQ ID NO: 8012 - DNA, 325 bp, Homo sapiens
tcctatgtgctgactcagccaccctcggtgtcagtggccccagggcagacggccaggattacctgtgggggagacagcattggaagtaaaagtgtgcactggtaccagcagaagccaggccaggcccctgtgctggtcgtctatgatgatagcgaccggccctcagggatccctgagcgattctctggctccaactctgggaacacggccaccctgaccatcagcagggtcgaagccggggatgaggccgactattactgtcaggtgtgggataatactagtgatcacctgcttttcggcggagggaccaagctgaccgtcctag

SEQ ID NO: 8013 - DNA, 331 bp, Homo sapiens
cagtctgccctgactcagcctgcctccgtgtctgggtctcctggacagtcgatcaccatctcctgcactggaaccagcagtgacgttggtggttataactatgtctcctggtaccaacaacacccaggcaaagcccccaaactcatgatttatgatgtcagtaatcggccctcaggggtttctaatcgcttctctggctccaagtctggcaacacggcctccctgaccatctctgggctccaggctgaggacgaggctgattattactgcagctcatatacaagcagcagcactctggtattcggcggagggaccaagctgaccgtcctag

SEQ ID NO: 8014 - DNA, 331 bp, Homo sapiens
cagtctgccctgactcagcctcgctcagtgtccgggtctcctggacagtcaatcaccatctcctgcactggaaccagcagtgatgttggtggttataactatgtctcctggtaccaacagcacccaggcaaagcccccaaactcatgatttatgatgtcactaagcgtccctcaggggtccctgatcgcttctctggctccaagtctggcaacacggcctccctgaccatctctgggctccgggctgaggatgaggctgattattactgctgctcatatgcaggcagctacacggaggtcttcggaactgggaccgaggtcaccgtcctag

SEQ ID NO: 8015 - DNA, 322 bp, Homo sapiens
gacatccagatgacccagtctccatcctccctgtctgcatctgtaggagacagagtcaccatcacttgccgggcaagtcagagcattagcagctatttaaattggtaccagcttgaaccagggaaagcccctaacctcctgatctatgctgcatccagtttgcaaagtggggtcccatcaaggttcagtggcagtggatctgggacagatttcactctcaccatcagcagtctgcaacctgaagattttgcaacttactactgtcaacagagttacagtacccccttcacttttggccaggggaccaagctggagatcaaac

SEQ ID NO: 8016 - DNA, 325 bp, Homo sapiens
tcctatgtgctgactcagccaccctcggtgtcagtggccccaggacagacggccaggattacctgtgggggaaacaacattggaagtcaaagtgtgctctggtaccatcagaggccaggccaggcccctgtgctggtcgtctatgatgatagcgaccggccctcagggatccctgagcgattttctggctccaactctggcaacacggccaccctgaccatcagcagggtcgaagccggggatgaggccgactattactgtcaggtgtgggatagtagtactgatcatgtggtattcggcgcagggaccaagctgaccgtcctag

SEQ ID NO: 8017 - DNA, 328 bp, Homo sapiens
gaaattgtgttgacgcagtctccaggcactctgtctttgtctccaggggaaagagccaccctctcctgcagggccagccagagtgttagcagcagctacttagcctggtaccagcagaaacctggccaggctcccaggctcctcatctatggtgcatccagcagggccactggcatcccagacaggttcagtggcagtgggtctgggacagacttcactctcaccatcagcagactggagcctgaagattttgcagtgtattactgtcagcagtatggtagctcacctctattcactttcggccctgggaccaaagtggatatcaaac

SEQ ID NO: 8018 - DNA, 325 bp, Homo sapiens
tcctatgagctgacacagccaccctcggtgtcagtgtccccaggacagacggccaggatcacctgctctggagatgcattgccaaaccaatatgcttattggtaccagcagaagccaggccaggcccctgtgctgataatttataaagacagtgagaggccctcagggatccctgagcgattctctggctccagctcagggacaacagtcacgttgaccatcagtggagtccaggcagaagatgaggctgactattactgtcaatcagcagacagcagtggtactccttatgtcttcggaactgggaccaaggtcaccgtcctag

SEQ ID NO: 8019 - DNA, 322 bp, Homo sapiens
gacatccagatgacccagtctccatcctccctgtctgcatctgtaggagacagagtcaccatcacttgccaggcgagtcaggacattagcaactatttaaattgctatcagcagaaaccagggacagcccctaagctcctgatctacgatgcatccaatttgcaaactggggtcccatcaaggttcagtggaagtggatctgggacagattttactttcaccatcagcagcctgcagcctgaagatattgcaacatattactgtcaagagtatgataatctcctcctcactttcggcggagggaccaaggtggagatcaaac

SEQ ID NO: 8020 - DNA, 316 bp, Homo sapiens
tcctatgtgctgactcagccaccctcggtgtcagtggccccaggacagacggccaggattacctgtgggggagacaacattggaagtaaaagtgtgcactggtaccagcagaagccaggccaggcccctgtgttggtcgtctatgatgatagcgaccggccctcagggatccctgagcgattctctggctccaactctgggaacacggccaccctgaccatcagcagggtcgaagccggggatgaggccgactattactgtcaggtgtgggatagtagtagtgtattcggcggagggaccaagctgaccgtcctag

SEQ ID NO: 8021 - DNA, 325 bp, Homo sapiens
gaaattgtgttgacacagtctccagccaccctgtctttggctccaggggaaagagccaccctctcctgcagggccagtcagagtattagcagctacttagcctggtaccaacagaaacctggccaggctcccaggctcctcatctatgatgcatccaacagggccactggcatcccagccaggttcagtggcagtgggtctgggacagacttcactctcaccatcagcaccctagagcctgaagattttgcagtttattactgtcagcagcgtagcaactggcctccgtggacgttcggccaagggaccaaggtggaaatcaaac

SEQ ID NO: 8022 - DNA, 325 bp, Homo sapiens
tcctatgtgctgactcagccaccctcggtgtcagtggccccaggacagacggccaggattacctgtgggggaaacaacattggaagtaaaagtgtgcactggtaccagcagaagccaggccaggcccctgtgctggtcgtcgatgatgatagcgaccggccctcagggatccctgagcgattctctggctccaactctgggaacacggccaccctgaccatcagcagggtcgaagccggggatgaggccgactattactgtcaggtgtgggatagtagtagtgatcatgtggtattcggcggagggaccaagctgaccgtcctag

SEQ ID NO: 8023 - DNA, 322 bp, Homo sapiens
gacatccagatgacccagtctccatcctccctgtctgcatctgtaggagacagagtcaccatcacttgccgggcaagtcagagcattagcagctatttaaattggtatcagcagaaaccagggaaagcccctaagctcctgatctatgctgcatccagtttgcaaagtggggtcccatcaaggttcagtggcagtggatctgggacagatttcactctcaccatcagcagtctgcaacctgaagattttgcaacttactactgtcaacagagttacagtacccctcgcactttcggccctgggaccaaagtggatatcaaac

SEQ ID NO: 8024 - DNA, 331 bp, Homo sapiens
cagtctgccctgactcagcctccctccgcgtccgggtctcctggacagtcagtcaccatctcctgcactggaaccagcagtgacgttggtggttataactatgtctcctggtaccaacagcacccaggcaaagcccccaaactcatgatttatgaggtcagtaagcggccctcaggggtccctgatcgcttctctggctccaagtctggcaacacggcctccctgaccgtctctgggctccaggctgaggatgaggctgattattactgcagctcatatgcaggcagcaacatcgtggtattcggcggagggaccaagctgaccgtcctag

SEQ ID NO: 8025 - DNA, 337 bp, Homo sapiens
gatattgtgatgactcagtctccactctccctgcccgtcacccctggagagccggcctccatctcctgcaggtctagtcagagcctcctgcatagtaatggatacaactatttggattggtacctgcagaagccagggcagtctccacagctcctgatctatttgggttctaatcgggcctccggggtccctgacaggttcagtggcagtggatcaggcacagattttacactgaaaatcagcagagtggaggctgaggatgttggcatttattactgcatgcaagctctacaaactttgtacacttttggccaggggaccaagctggagatcaaac

SEQ ID NO: 8026 - DNA, 325 bp, Homo sapiens; identical to SEQ ID NO: 4861

SEQ ID NO: 8027 - DNA, 325 bp, Homo sapiens
gacatccagatgacccagtctccatcctccctgtctgcatctgtaggagacagagtcaccatcacttgccaggcgagtcaggacattagcaactatttaaattggtatcagcagaaaccagggaaagcccctaagctcctgatctacgctgcatccaatttggaaacaggggtcccatcaaggttcagtggaagtgggtctgggacagattttactttcaccatcagcagcctgcagcctgaagatattgcaacatattactgtcaacagtatagtgatctccccttattcactttcggccctgggaccaaagtggatatcaaac

SEQ ID NO: 8028 - DNA, 322 bp, Homo sapiens
gaaattgtgttgacacagtctccagccaccctgtctttgtctccaggggaaagagccaccctctcctgcagggccagtcagagtgttagcagctacttagcctggtaccaacagaaacctggccaggctcccaggctcctcatctatgatgcatccaacagggccactggcatcccagccaggttcagtggcagtgggtctgggacagacttcactctcaccatcagcagcctagagcctgaagattttgcagtttattactgtcagcagcgtagcaactggccgtacacttttggccaggggaccaagctggagatcaaac

SEQ ID NO: 8029 - DNA, 331 bp, Homo sapiens
cagtctgtgctgactcagccaccctcagcgtctgggacccccgggcagagggtcaccatctcttgttctggaagcagctccaacatcggaagtaattatgtatactggtatcagcagttcttaggaacggcccccaaactcctcatctataggaataatcagcggccctcaggggtccctgaccgattctctggctccaagtctggcacctcagcctccctggccatcagtgggctccggtccgaggatgaggctgattattactgtgcagcatgggatgacagcctgagtgggattgtcttcggaactgggaccaaggtcaccgtcctag

SEQ ID NO: 8030 - DNA, 325 bp, Homo sapiens
gaagttgtgttgacacagtctccagccaccctgtctttgtctccaggggaaagcgccaccctctcctgcagggccagtcagagtgttagtatttacttagcctggtaccaacagagacctggccaggctcccaggctcctcatctatgatgcatcctacagggccactggcatcccagccaggttcagtggcagtgggtctgggacagacttcactctcaccatcagcagcctagagcctgaagattttgcagtttattactgtcagcagcgtagcaactggcctccgatcaccttcggccaagggacacgactggagattaaac

SEQ ID NO: 8031 - DNA, 325 bp, Homo sapiens
tcctatgaactgacacagccaccctcggtgtcagtgtccccaggacagacggccaggatcacctgctctggagatgcattgccaaagcagtatgctaattggtaccatcagaagccaggccaggcccctgtggtggtgatatataaagacactgagaggccctcagggatccctgagcgattctctggctccagctcagggacaagagtcacgttgaccatcagtggagtccaggcagaagacgaggctgactattactgtcaatcggcagacagcagcggtacttattggctgttcggcggagggaccaagctgaccgtcctag

SEQ ID NO: 8032 - DNA, 328 bp, Homo sapiens
gaaattgtgttgacgcagtctccaggcaccctgtctttgtctccaggggaaagagccaccctctcctgcagggccagtcagagtgttagcagcagctacttagcctggtaccagcagaaacctggccaggctcccaggctcctcatctatggtgcatccagcagggccactggcatcccagacaggttcagtggcagtgggtctgggacagacttcactctcaccatcagcagactggagcctgaagattttgcagtgtattactgtcagcagtatggtagctcacccgcgctcactttcggcggagggaccaaggtggagatcaaac

SEQ ID NO: 8033 - DNA, 331 bp, Homo sapiens
cagtctgttttgacgcagccgccctcagtgtctgcggccccaggacagaaggtcaccatctcctgctctggaagcagctccaacattgggaagaattatgtatcctggtaccagcagctcccaggaacagcccccaaactcctcatttatgacaataataagcgaccctcagggattcctgaccgattctctggctccaagtctggcacgtcagccaccctgggcatcaccggactccagactggggacgaggccgattattactgcggaacatgggatagcagcctgagtttttatgtcttcggaactgggaccaaggtcaccgtcctag

SEQ ID NO: 8034 - DNA, 322 bp, Homo sapiens; identical to SEQ ID NO: 5205

SEQ ID NO: 8035 - DNA, 325 bp, Homo sapiens
gaaatagtgatgacgcagtctccagccaccctgtctgtgtctccaggggaaggagcctccctctcctgcagggccagtcagactgttagcagcaacttagcctggtaccagcagaaacctggccaggctcccaggctcctcatctatggtgcatccaccagggccactggtatcccagccaggttcagtggcagtgggtctgggacagagttcactctcaccatcagcagcctgcagtctgaagattttgcagtttattactgtcagcagtataataactggcctccgtggacgttcggccaagggaccaaggtggaaatcaaac

SEQ ID NO: 8036 - DNA, 330 bp, Homo sapiens
cagtctgtgctgagtcagccaccctcagcgtctgggacccccgggcagagggtcaccatctcttgttctggaagcacctccaacatcggaagtaatactgtaaactggtaccagcacctcccaggaacggcccccaaactcctcatctatagtaataatcagcggccctcaggggtccctgaccgattctctggctccaagtctggcacctcagcctccctggccatcagtgggctccagtctgaggatgaggctgattattactgtgcagcatgggatgacagcctgaatggagtggtattcggcggagggaccaagctgaccgtccta

SEQ ID NO: 8037 - DNA, 325 bp, Homo sapiens
tcctatgtgctgactcagccaccctcggtgtcagtggccccaggacagacggccaggattacctgtggggggaacaacattggaagtaatagtgtgcactggtaccaccagaagccaggccaggcccctgtgctggtcgtctatgatgatagcgaccggccctcagggatccctgagcgattctctggctccaagtctgggaacacggccaccctgaccatcagcagggtcgaagccggggatgaggccgactattactgtcaggtgtgggatagtgatagtgatcatgtggtattcggcggagggaccaagctgaccgtcctag

SEQ ID NO: 8038 - DNA, 319 bp, Homo sapiens
gacatccagatgacccagtctccatcctccctgtctgcatctgtaggagacagagtcaccatcacttgccgggcgagtcagggcattagcaattatttagcctggtatcagcagaaaccagggaaagttcctaagctcctgatctatgctgcatccactttgcaatcaggggtcccatctcggttcagtggcagtggatctgggacagatttcactctcaccatcagcagcctgcagcctgaagatgttgcaacttattactgtcaaaagtataacagtgccttcactttcggccctgggaccaaagtggatatcaaac

SEQ ID NO: 8039 - DNA, 325 bp, Homo sapiens
gacatccagatgacccagtctccatcctccctgtctgcatctgtaggagacagagtcaccatcacttgccgggcaagtcagagcattagtagctatttaaattggtatcagcagaaaccagggaaagcccctaagctcctgatctatgctgcattcagtttgcaaagtggggtcccatcaaggttcagtggcagtggatctgggacagatttcaatttaaccatcagcagtctgcaacctgaagattttgcaacttactactgtcaacagagttacagtacccccccgctcactttcggcggagggaccaaggtggagatcaaac

SEQ ID NO: 8040 - DNA, 319 bp, Homo sapiens
tcctatgagctgactcagccaccctcagtgtccgtgtccccaggacagacagccagcatcacctgctctggagataaattgggggataaatatgcttcctggtatctgcagcagccaggccagtcccctgtactggtcatctttcaagataccaagcggccctcagggatccctgagcgattctctggctccaactctgggaacacagccactctgaccatcagcgggacccaggctatggatgaggctgactattactgtcaggcgtgggacagcagcacgggggtattcggcggagggaccaagctgaccgtcctag

SEQ ID NO: 8041 - DNA, 325 bp, Homo sapiens
gaaattgtgttgacgcagtctccaggcaccctgtctttgtctccaggggaaagagccaccctctcctgcagggccagtcagagtgttagcagcagctacttagcctggtaccgacagaaacctggccaggctcccaggctcctcatctatggtgcatccagcagggccactggcatcccagacaggttcagtggcagtgggtctgggacagacttcactctcaccatcagcagactggagcctgaagattttgcagtgtattactgtcagcactatggtacctcaccgttcacttttggccaggggaccaagctggagatcaaac

SEQ ID NO: 8042 - DNA, 325 bp, Homo sapiens
tcctatgtgctgactcagccaccctcagtgtcagtggccccaggaaagacggccacgattacctgtgggggacacaacattggaattacaagtgtgcactggtaccagcagaagccaggccaggcccctgtactggtcatctataatagtgacgaccggccctcagggatccctgagcgattctctggctccaactctgggaacgcggccaccctgaccatcagcagggtcgaagccggggatgaggccgactattactgtcaggtgtgggatagtcgtggtgatcatgtggtattcggcggagggaccaagctgaccgtcctag

SEQ ID NO: 8043 - DNA, 334 bp, Homo sapiens
cagtctgccctgactcagcctgcctccgtgtctgggtctcctggacagtcgatcaccatctcctgcactggaaccagcagtgatattgggagttataaccttgtctcctggtaccaacaacacccaggcaaagcccccaaactcatgatttatgaggtcagtaagcggccctcagaggtttctaatcgcttctctggctccaagtctggcaacacggcctccctgacaatctctgggctccaggctgaggacgaggctgattattactgctgctcatatgcagatagtagcacttccgtggtattcggcggagggaccaagctgaccgtcctag

SEQ ID NO: 8044 - DNA, 322 bp, Homo sapiens; identical to SEQ ID NO: 7884

SEQ ID NO: 8045 - DNA, 328 bp, Homo sapiens
gaaattgtgttgacgcagtctccaggcaccctgtctttgtctccaggggaaagagccaccctctcctgcagggccagtcagagtgttagcagcagctacttagcctggtaccagcagaaacctggccaggctcccaggctcctcatctatggtgcatccaacagggccactggcatcccagacaggttcagtggcagtgggtctgggacagacttcactctcaccatcagcagactggagcctgaagattttgcagtgtattactgtcagcagtatggtagctcacccgcgctcactttcggcggagggaccaaggtggagatcaaac

SEQ ID NO: 8046 - DNA, 322 bp, Homo sapiens
gaaatagtgatgacgcagtctccagccaccctgtctgtgtctccaggggaaagagccaccctctcctgcagggccagtcagagtgttagcagcaacttagcctggtaccagcagaaacctggccaggctcccaggctcctcatctatggtgcatccaccagggccactgctatcccagccaggttcagtggcagtgggtctgggacagagttcactctcaccatcagcagcctgcagtctgaagattttgcagtttatttctgtcagcagtataataactggccggggacttttggccaggggaccaagctggagatcaaac

SEQ ID NO: 8047 - DNA, 325 bp, Homo sapiens
tcctatgagctgacacagccaccctcggtgtcagtgtccccaggacaaacggccaggatcacctgctctggagatgcattgccaaaaaaatatgcttattggtaccagcagaagtcaggccaggcccctgtgctggtcatctatgaggacagcaaacgaccctccgggatccctgagagattctctggctccagctcagggacaatggccaccttgactatcagtggggcccaggtggaggatgaagctgactactactgttactcaacagacagcagtggtaatcatggggtattcggcggagggaccaagctgaccgtcctag

SEQ ID NO: 8048 - DNA, 325 bp, Homo sapiens
tcctatgagctgacacagccaccctcggtgtcagtgtccccaggacaaacggccaggatcacctgctctggagatgcattgccaaaaaaatatgcttattggtaccagcagaagtcaggccaggcccctgtgatggtcatctatgaggacagcaaacgaccctccgggatccctgagagattctctggctccagctcagggacaatggccaccttgactatcagtggggcccaggtggaggatgaagctgactactactgttactcaacagacaacagtggtcatcattgggtgttcggcggagggaccaagctgtccgtcctag

SEQ ID NO: 8049 - DNA, 328 bp, Homo sapiens
tcctatgagctgacacagccaccctcggtgtcagtgtccccaggacaaacggccaggatcacctgctctggagatgcattgccaaaaaaatatgcttattggtaccagcagaagtcaggccaggcccctgtgctggtcatctatgaggacagcaaacgaccctccgggatccctgagagattctctggctccagctcagggacaatggccaccttgactatcggtggggcccaggtggaggatgaagctgactactactgttactcaacagacagcagtggtaatctccattgggtgttcggcggagggaccaagctgaccgtcctag

SEQ ID NO: 8050 - DNA, 319 bp, Homo sapiens
gacatccagatgacccagtctccttccaccctgtctgcatctgtaggagacagagtcaccatcacttgccgggccaatcagagtattagtagctggttggcctggtatcagcagaaacctgggaaagcccctaagctcctgatctatgaggcgtctagtttaggaagtggggtcccatcaaggttcagcggcagtggatctgggacagaattcactctcaccatcagcagcctgcagcctgatgattttgcaacttattactgccaacagtataatagttatcacacttttggccaggggaccaagctggagatcaaac

SEQ ID NO: 8051 - DNA, 331 bp, Homo sapiens
cagtctgccctgactcagcctgcctccgagtctgggtctcctggacagtcgatcaccatctcctgtattggaaccagcagtgacgttggtaattataactatgtctcctggtaccaacaacacccaggcaaagcccccaaactcatgatttatgatgtcactaatcggccctcaggggtttctaatcgcttctctggctccaagtctggcaacacggcctccctgaccatctctgggctccaggctgaggacgaggctgattattactgcagctcatatacaagcagcggcactcaagtgttcggcggagggaccaagctgaccgtcctag

SEQ ID NO: 8052 - DNA, 322 bp, Homo sapiens
gacatccagatgacccagtctccatcctccctgtctgcatctgtaggagacagagtcaccatcacttgccaggcgagtcaggacattagcaactatttaaattggtatcagcagaaaccaggaaaagcccctaagctcctgatctacgatgcatccaatttggaaacaggggtcccatcaaggttcagtggaagtggatctgggacagattttactttcaccatcagcagcctgcagcctgaagatattgcaacatattactgtcaacagtatggtaatctcccttacacttttggccaggggaccaagctggagatcaaac

SEQ ID NO: 8053 - DNA, 331 bp, Homo sapiens
cagtctgccctgactcagcctgcctccgtgtctgggtctcctggacagtcgatcaccatctcctgcactggaaccagcagtgacgttggtgcttataactatgtctcctggttccaacagcacccaggcaaagcccccaaactcatgatttatgatgtcagtaatcggccctcaggggtttctaatcgcttctctggctccaagtctggcaacacggcctccctgaccatctctgggctccaggctgaggacgaggctgattattactgcagctcatatacaagcagcaacacttatgtcttcggaactgggaccaaggtcaccgtcctag

SEQ ID NO: 8054 - DNA, 325 bp, Homo sapiens
gacatccagatgacccagtctccatcctccctgtctgcatctgtaggagacagagtcaccatcacttgccaggcgagtcaggacattaccaactctttaaattggtatcagcagaaaccagggaaagcccctaagctcctgatctacgatgcatccaatttggaagcaggggtcccatcaaggttcagtggcagtggatctgggacagattttactttcaccatcagcagcctgcagcctgaagatattgcaacatattactgtcaacagtatgatgatctcctcgggctcactttcggcggagggaccaaggtggagatcaaac

SEQ ID NO: 8055 - DNA, 322 bp, Homo sapiens
gacatccagatgacccagtctccatcctccctgtctgcatctgtaggagacagagtcaccatcacttgccaggcgagtcaggacattaacaactatttaaattggtatcagcagaaaccagggacagcccctaagctcctgatttacgatgcatccaatttggaaacaggggtcccgtcaaggttcagtggaagtggatctgggacagattttactttcaccatcagcagcctgcagcctgaagatattgcagcatattactgtcaacagtatgataatctcccgctcactttcggcggagggaccaaggtggagatcaaac

SEQ ID NO: 8056 - DNA, 332 bp, Homo sapiens
cagtctgtgctgactcagcctccctcagcgtctgggacccccgggcagagggtcaccatctcttgctctggaagcggctccaacatcggaagttataatgtaaactggtaccagcaagtcccgggattggcccccaaactcctcatccacactaataatttgcggccctcaggggtccctgaccgattctctggctccaagtctggctcctcagcctccctggccatcagtgggctccggtctgaggatgaggctgattattactgtgcaacatgggatgacagtgtggatgtccattgggtgttcggcggagggaccaagttgaccgtcct

SEQ ID NO: 8057 - DNA, 325 bp, Homo sapiens
gacatccagatgacccagtctccatcctccctgtctgcatctgtaggagacagagtcaccatcacttgccaggcgagtcaggacattaccaactatttaaattggtatcagcagaaaccagggaaagcccctaagctcctgatctacgatgcatccaatttggaaacaggggtcccatcaaggttcagtggaagtggatctgggacaaattttactttcaccatcagcagcctgcagcctgaagatattgcaacatattactgtcaacagtatgattatcgccctccgtacacttttggccaggggaccaagctggagatcaaac

SEQ ID NO: 8058 - DNA, 333 bp, Homo sapiens
cagtctgccctgactcagcctgcctccgtgtctgggtctcctggacagtcgatcaccatctcctgtactggaaccagcagtgatgttgggagttataaccttgtctcctggtaccaacagcacccaggcaaagcccccaaactcatgatttatgagggcagtgagcggccctcaggggtttctaatcgcttctctggctccaagtctggcaacacggcctccctgacaatctctgggctccaggctgaagacgaggctgattattactactgctcatatgcaggtagtagctctttcggatattcggcggagggaccaagctgaccgtcctag

SEQ ID NO: 8059 - DNA, 322 bp, Homo sapiens
gaaattgtgttgacacagtctccagccaccctgtctttgtctccaggggaaagagccaccctctcctgcagggccagtcagagtgttagcagctacttagcctggtaccaacagaaacctggccaggctcccaggctcctcatctatgatgcatccaacagggccactggcatcccagccaggttcagtggcagtgggtctgggacagacttcactctcaccatcagcagcctagagcctgaagattttgcagtttattactgtcagcagcgtagcaactggcctctcactttcggccctgggaccaaagtggatatcaaac

SEQ ID NO: 8060 - DNA, 322 bp, Homo sapiens
gacatccagatgacccagtctccatcctccctgtctgcatctgtaggagacagagtcaccatcacttgccgggcaagtcagggcattagaaatgatttgggctggtatcagcagaaaccagggaaagcccctaagcgcctgatatattctgcgtccactttgcaaagtggggtcccatcaaggttcagcggcagtggatctgggacagacttcactctcacaatcagcagcctgcagcctgaggattttgcaacttatttctgtctacagcataatacttacccgtacacttttggcccggggaccaagctggagctcaaac

SEQ ID NO: 8061 - DNA, 322 bp, Homo sapiens
gacatccagatgacccagtctccatcttccgtgtctgcatctgtaggagacagagtcaccatcacttgtcgggcgagtcagggtattagcagctggttagcctggtatcagcagaaaccagggaaagcccctaagctcctgatctatgctgcatccagtttgcaaagtggggtcccatcaaggttcagcggcagtggatctgggacagatttcactctcaccatcagcagcctgcagcctgaagattttgcaacttactattgtcaacaggctaacagtttccctctcactttcggcggagggaccaaggtggagatcaaac

SEQ ID NO: 8062 - DNA, 340 bp, Homo sapiens
gacatcgtgatgacccagtctccagactccctggctgtgtctctgggcgagagggccaccatcaactgcaagtccagccagagtgttttatacagctccaacaataagaactacttagcttggtaccagcagaaaccaggacagcctcctaagctgctcatttactgggcatctacccgggaatccggggtccctgaccgattcagtggcagcggttctgggacagatttcactctcaccatcagcagcctgcaggctgaagatgtggcagtttattactgtcagcaatattatagtactccgtacacttttggccaggggaccaagctggagatcaaac

SEQ ID NO: 8063 - DNA, 322 bp, Homo sapiens
gacatccagatgacccagtctccatcctccctgtctgcatctgtaggagacagagtcaccatcacttgccgggcaagtcagagcattaacaactatttaaattggtatcagcagaaaccagggaaagcccctaagctcctgatctatgctgcatccagtttgcaaagtggggtcccatcaaggttcagtggcagtggatctgggacagatttcactctcaccatcagcagtctgcaacctgaagattttgcaacttactactgtcaacagagttacagtaccccgggaacgttcggccaagggaccaaggtggaaatcaaac

SEQ ID NO: 8064 - DNA, 322 bp, Homo sapiens; identical to SEQ ID NO: 2451

SEQ ID NO: 8065 - DNA, 327 bp, Homo sapiens
gaaattgtgttgacgcagtctccaggcaccctgtctttgtctccaggggaaagagccaccctctcctgcagggccagtcagagtgttagcggcagctacttagcctggtaccagcagaaacctggccaggctcccaggctcctcatctatgatgcatccagcagggccactggcatcccagacaggttcagtggcagtgggtctgggacagacttcactctcaccatcagcagactggagcctgaagattttgcagtgtattactgtcagcagtatggtagctcaccacgtggacgttcggccaagggaccaaggtggaaatcaaac

SEQ ID NO: 8066 - DNA, 322 bp, Homo sapiens
gaaattgtgttgacacagtctccagccaccctgtctttgtctccaggggaaagagccaccctctcctgcagggccagtcagagtgttagcagctacttagcctggtaccaacagaaacctggccaggctcccaggctcctcatctatgatgcatccaacagggccactggcatcccagccaggttcagtggcagtgggtctgggacagacttcactctcaccatcagcagcctagagcctgaagattttgcagtttattactgtcagcagcgtagcaactggcctaacactttcggcggagggaccaaggtggagatcaaac

SEQ ID NO: 8067 - DNA, 322 bp, Homo sapiens
gccatccggatgacccagtctccatcctcattctctgcatctacaggagacagagtcaccatcacttgtcgggcgagtcagggtattagcagttatttagcctggtatcagcaaaaaccagggaaagcccctaagctcctgatctatgctgcatcgactttgcaaagtggggtcccatcaaggttcagcggcagtggatctgggacagatttcactctcaccatcagctgcctgcagtctgaagattttgcatcttattactgtcaacagtattatagttacccgtacacttttggccaggggaccaagctggagaacaaac

SEQ ID NO: 8068 - DNA, 322 bp, Homo sapiens
tcttctgagctgactcaggaccctgctgtgtctgtggccttgggacagacagtcaggatcacatgccaaggagacagcctcagaagctattatgcaagctggtaccagcagaagccaggacaggcccctgtacttgtcatctatgctgaaaagaaccggccctcagggatcccagaccgattctctggctccagctcaggaaacacagcttccttgaccatcactggggctcaggcggaagatgaggctgactattactgtaactcccgggacagcagtgctaaccattatgtcttcggaactgggaccaaggtcaccgtcc

SEQ ID NO: 8069 - DNA, 334 bp, Homo sapiens
cagtctgtcctgacgcagccgccctcagtgtctggggccccagggcagagggtcaccatctcctgcactgggagcagctccaacatcggggccggttatgatgtacactggtaccagcaggttccaggaacagcccccaaactcctcatctatgctaacaccaatcggccctcaggggtccctgaccgattctctggctccaagtctggcacctcagcctccctggccatcactgggctccaggctgaggatgaggctgattattactgccagtcctatgacagcagcctgagtggttcggtattcggcggagggagcaagctgaccgtcctag

SEQ ID NO: 8070 - DNA, 331 bp, Homo sapiens
cagtctgtgttgacgcagccgccctcagtgtctgcggccccaggacagaaggtcaccatctcctgctctggaagcagctccaacattgggaataattatgtatcctggtaccagcagctcccaggaacagcccccaaactcctcatttatgacaataataagcgaccctcagggattcctgaccgattctctggctccaagtctggcacgtcagccaccctgggcatcaccggactccagactggggacgaggccgattattactgcggaacatgggatagcagcctgagtgcttgggtgttcggcggagggaccaagctgaccgtcctag

SEQ ID NO: 8071 - DNA, 325 bp, Homo sapiens
gacatccagttgacccagtctccatccttcctgtctgcatctgtaggagacagagtcaccatcacttgccgggccagtcagggcattagcagttatttagcctggtatcagcaaaaaccagggaaagcccctaagctcctgatctatgctgcatccactttgcaaagtggggtcccatcaaggttcagcggcagtggatctgggacagaattcactctcacaatcagcagcctgcagcctgaagattttgcaacttattactgtcaacagcttaatagttaccccccgtacacttttggccaggggaccaagctggagatcaaac

SEQ ID NO: 8072 - DNA, 322 bp, Homo sapiens; identical to SEQ ID NO: 3934

SEQ ID NO: 8073 - DNA, 328 bp, Homo sapiens
gaaatagtgatgacgcagtctccagccaccctgtctgtgtctccaggggaaagagccaccctctcctgcagggccagtcagagtgttagcagcaacttagcctggtaccagcagaaacctggccaggctcccaggctcctcatctatggtgcatccaccagggccactggtatcccagccaggttcagtggcagtgggtctgggacagagttcactctcaccatcagcagcctgcagtctgaagattttgcagtttattactgtcagcagtataataactggcctccggcgctcactttcggcggagggaccaaggtggagatcaaac

SEQ ID NO: 8074 - DNA, 322 bp, Homo sapiens
gacaaccagatgacccagtctcattccaccctgtctgcatctgtaggagacagagtcaccatcacttgtcgggccagtcagagtattaataactggttggcctggtatcagcagaaaccagggaaagcccctaagctcctgatctataaggcgtctagtttagaaagtggggtcccatcaaggttcagcggcagtggatctgggacagaattcactctcaccatcagcagcctgcagcctgatgattttgcaacttattactgccaacagtatcatagttatcctctcactttcggcggagggaccaaggtggagatcaaac

SEQ ID NO: 8075 - DNA, 325 bp, Homo sapiens; identical to SEQ ID NO: 3577

SEQ ID NO: 8076 - DNA, 323 bp, Homo sapiens
tcttctgagctgactcaggaccctgctgtgtctgtggccttgggacagacagtcaggatcacatgccaaggagacagcctcagaagctattctgcaagttggtaccagcagaagccaggacaggcccctgtacttgtcatctatggtaaaaacaaccggccctcagggatcccagaccgattctctggctccacttcaggaaacacagcttccttgaccatcactggggctcaggcggaagatgaggctgactattactgtgactcccgggacagcagtgagaaccgtctggtattcggcggagggaccaagctgaccgtcct

SEQ ID NO: 8077 - DNA, 322 bp, Homo sapiens
gacgtccagatgacccagtctccttccaccctgtctacatctgtaggagacagagtcaccatcacttgccgggccagtcagagtgttagtagttggttggcctggtatcagcagaaaccagggaaagcccctaagctcctgatctataaggcgtctagtttagaaagtggggtcccatcaaggttcagcggcagtggatctgggacagaattcactctcaccatcagcaacctgcagcctgatgattttgcaacttattactgccaacagtatgatagttattctcggacgttcggccaagggaccaagatggaaatcaaac

SEQ ID NO: 8078 - DNA, 334 bp, Homo sapiens
cagtctgtgctgacgcagccgccctcagtgtctggggccccagggcagagggtcaccataacctgcactgggagcagatccaacatcggggcaggttttgatgtacattggcaccagcagcttccaggaacagcccccaagctcctcatctatggtaataacgatcggccctcaggggtccctgaccgattctctggctccaagtctggcacctcagcctccctggtcatcactggactccaggctgaggatgaggctgattattactgccagtcctatgacagcagcctgagtgctcttgtattcggaggaggcacccagctgaccgtcctcg

SEQ ID NO: 8079 - DNA, 325 bp, Homo sapiens
tcctatgagctgacacagccaccctcggtgtcagtgtccccaggacagacggccaggatcacctgctctggagatgcattgccaaagcaatatgcttattggtaccagcagaagccaggccaggcccctgtgctggtgatatataaagacagtgagaggccctcagggatccctgagcgattctctggctccagctcagggacaacagtcacgttgaccatcagtggagtccaggcagaagacgaggctgactattactgtcaatcagcagacagcagtggtacttcttgggtgttcggcggagggaccaagctgaccgtcctag

SEQ ID NO: 8080 - DNA, 322 bp, Homo sapiens
gacatccagatgacccagtctccatcttccgtgtctgcatctgtaggagacagagtcaccatcacttgtcgggcgagtcagggtattaggagctggttagcctggtatcagcagaaaccagggaaagcccctaagctcctgatctattctgcatccagtttgcaaagtggggtcccatcaaggttcagcggcagtggatctgggacagatttcactctcaccatcagcagcctgcagcctgaagattttgcaacttactattgtcaacaggctaacagtttcccgtacacttttggccaggggaccaaggtggagatcaaac

SEQ ID NO: 8081 - DNA, 331 bp, Homo sapiens
cagtctgccctgactcagcctccctccgtgtccgggtctcctggacagtcagtcaccatctcctgcactggaaccagcagtgacgttggtagttataaccgtgtctcctggtaccagcagcccccaggcacagcccccaaactcatgatttatgaggtcagtaatcggccctcaggggtccctgatcgcttctctgggtccaagtctggcaacacggcctccctgaccatctctgggctccaggctgaggacgaggctgattattactgcagctcatatacaagcagcagcactttggtattcggcggagggaccaagctgaccgtcctag

SEQ ID NO: 8082 - DNA, 331 bp, Homo sapiens
cagtctgccctgactcagcctgcctccgtgtctgggtctcctggacagtcgatcaccatctcctgcactggaaccagcagtgacgttggtggttataaatatgtctcctggtaccaacaacacccaggcaaagcccccaaactcatgatttatgatgtcagtaatcggccctcaggggtttctaatcgcttctctggctccaagtctggcaacacggcctccctgaccatctctgggctccaggctgaggacgaggctgattattactgcagctcatatacaagcagcagcactcgggtgttcggcggagggaccaagctgaccgtcctag

SEQ ID NO: 8083 - DNA, 325 bp, Homo sapiens; identical to SEQ ID NO: 2568

SEQ ID NO: 8084 - DNA, 322 bp, Homo sapiens; identical to SEQ ID NO: 6119

SEQ ID NO: 8085 - DNA, 325 bp, Homo sapiens
gaaattgtgttgacgcagtctccaggcaccctgtctttgtctccaggggaaagagccaccctctcctgcagggccagtcagagtattagcagcacctacttagcctggtaccagcagaaacctggccaggctcccaggctcctcatctatggtgcatccagcagggccactggcatcccagacaggttcagtggcagtgggtctgggacagacttcactctcaccatcagcagactggagcctgaagattttgcagtgtattactgtcagcagtatggtagctcaccggggacgttcggccaagggaccaaggtggaaatcaaac

SEQ ID NO: 8086 - DNA, 331 bp, Homo sapiens
cagtctgccctgactcagcctccctccgtgtccgggtctcctggacagtcagtcaccatctcctgcactggaaccagcagtgacgttggtagttataaccgtgtctcctggtaccagcagcccccaggcacagcccccaaactcatgatttatgaggtcagtaatcggccctcaggggtccctgatcgcttctctgggtccaagtctggcaacacggcctccctgaccatctctgggctccaggctgaggacgaggctgattattactgcagctcatatacaagcagcagcactttggtgttcggcggagggaccaagctgaccgtcctag

SEQ ID NO: 8087 - DNA, 322 bp, Homo sapiens
gaaatagtgatgacgcagtctccagccaccctgtctgtgtctccaggggaaagagccaccctctcctgcagggccagtcagagtgttagcagcaacttagcctggtaccagcagaaacctggccaggctcccaggctcctcatctatggtgcatccaccagggccactggtatcccagccacgttcagtggcagtgggtctgggacagagttctctctcaccatcagcagcctgcagtctgaagattttgcagtttattactgtcagcagtataatgactggcccctcactttcggcggagggaccaaggtggagatcaaac

SEQ ID NO: 8088 - DNA, 328 bp, Homo sapiens
gaaattgtgttgacgcagtctccaggcaccctgtctttgtctccaggggaaagagccaccctctcctgcagggccagtcagagtgttagcagcagctacttagcctggtaccagcagaaacctggccaggctcccaggctcctcatctatggtgcatccagcagggccactggcatcccagacaggttcagtggcagtgggtctgggacagacttcactctcaccatcagcagactggagcctgaagattttgcagtgtattactgtcagcagtatggtagctcacctccggacacttttggccaggggaccaagctggagatcaaac

SEQ ID NO: 8089 - DNA, 326 bp, Homo sapiens
tcctatgtgctgactcagccaccctcggtgtcagtggccccaggacagacggccaggattacctgtgggggaaacaacattggaagtaaaagtgtgcactggtaccagcagaagccaggccaggcccctgtgctggtcgtctatgatgatagcgaccggccctcagggatccctgagcgattctctggctccaactctgggaacacggccaccctgaccatcagcagggtcgaagccggggatgaggccgactatcactgtcaggtgtgggatactagtagtgatcatttttatgtcttcggaactgggaccaaggtcaccgtcct

SEQ ID NO: 8090 - DNA, 313 bp, Homo sapiens
tcctatgagctgacacagccaccctcggtgtcagtgtccccaggacaaacggccaggatcacctgctctggagatgcattgccaaaaaaatatgcttattggtaccagcagaagtcaggccaggtggtcatctatgaggacagcaaacgaccctccgggatccctgagagattctctggctccagctcagggacaatggccaccttgactatcagtggggcccaggtggaggatgaagctgactactactgttactcaacagacagcagtggtaatcatgtgttcggcagtggcaccaaggtgaccgtcctcg

SEQ ID NO: 8091 - DNA, 337 bp, Homo sapiens
gatattgtgatgacccagactccaccctctctgtccgtcacccctggacagccggcctccatctcctgcaagtctagtcagagcctcctgcatagtgatggaaagacccatttgtattggtacctgcagaagccaggccagtctccacagctcctgatctatgaagtttccaaccggttctctggagtgccaaataggttcggtggcagcgggtcagggacagacttcacactgaaaatcagccgggtggaggctgaagatgttggagtttattactgcatgcaaaataaacagcttcctctcactttcggcggagggaccaaggtggagatcaaac

SEQ ID NO: 8092 - DNA, 319 bp, Homo sapiens
tcctatgagctgactcagccaccctcagtgtccgtgtccccaggacagacagccagcatcacctgctctggagataaattgggggataaatatgcttgctggtatcagcagaagccaggccagtcccctgtgctggtcatctatcaagataccaagcggccctcagggatccctgagcgattctctggctccaactctgggaacacagccactctgaccatcagcgggacccaggctatggatgaggctgactattactgtcaggcgtgggacagcagcactgtggtattcggcggagggaccaagctgaccgtcctag

SEQ ID NO: 8093 - DNA, 340 bp, Homo sapiens
gacatcgtggtgacccagtctccagactccctggctgtgtctctgggcgagagggccaccatcaactgcaagtccagccagagtgttttattcagctccaacaataagaactactttgcttggtaccagcagaaaccaggacagcctcctaagctgctcatttactgggcatctacccgggaatccggggtccctgaccgattcactggcagcgggtctgggacagatttcactctcaccatcagcagcctgcaggctgaagatgtggcagtttattactgtcagcaatattatagtactccgctcactttcggcggagggaccaaggtggagatcaaac

SEQ ID NO: 8094 - DNA, 320 bp, Homo sapiens
gacatccagatgacccagtctccttccaccctgtctgcatctgtaggagacagagtcaccatcacttgccgggccagtcagagtattagtagctggttggcctggtatcagcagaaaccagggaaagcccctaagctcctgatctataaggcgtctagtttagaaagtggggtcccatcaaggttcagcggcagtggatctgggacagaattcactctcaccatcagcagcctgcagcctgatgattttgcaacttattactgccaacagtataatagttattcggacgttcggccaagggaccaaggtggaaatcaaac

SEQ ID NO: 8095 - DNA, 331 bp, Homo sapiens; identical to SEQ ID NO: 3332

SEQ ID NO: 8096 - DNA, 340 bp, Homo sapiens
gacatcgtgatgacccagtctccagactccctggctgtgtctctgggcgagagggccaccatcaactgcaagtccagccagagtgttttatacagttccaacaataagaactacttagcttggttccagcagaaaccaggacagcctcctaagctgctcatttactgggcatctacccgggaatccggggtccctgaccgattcagtggcagcgggtctgggacagatttcactctcaccatcagcagcctgcaggctgaagatgtggcagtttattactgtcagcaatattgtagtattcccctcaccttcggccaagggacacgactggagattaaac

SEQ ID NO: 8097 - DNA, 319 bp, Homo sapiens
tcctatgagctgactcagccaccctcactgtccgtgtccccaggacagacagccagcatcacctgctctggagataaattgggggatgaatatgcttgctggtatcagcagaagccaggccagtcccctcttctggtcatctatcaagatagtaagcggccctcaggcatccctgagcgattctctggctccaactctgggaacacagccactctgaccatcagcgggacccaggctatggatgaggctgactattactgtcaggcgtgggacagcagcactgtggtattcggcggagggaccaagctgaccgtcctag

SEQ ID NO: 8098 - DNA, 331 bp, Homo sapiens
cagtctgtgttgacgcagccgccctcagtgtctgcggccccaggacagaaggtcaccatctcctgctctggaagcagctccaacattgggaataattatgtatcctggtaccagcaactcccaggaacagcccccaaactcctcatttatgacaataataagcgaccctcagggattcctgaccgattctctggctccaagtctggcacgtcagccaccctgggcatcaccggactccagactggggacgaggccgattattactgcggaacatgggatagcagcctgagtgctgtggtattcggcggagggaccaagctgaccgtcctag

SEQ ID NO: 8099 - DNA, 322 bp, Homo sapiens
tcttctgagctgactcaggaccctgctgtgtctgtggccttgggacagacagtcaggatcacatgccaaggagacagcctcagaagctattatgcaagctggtaccagcagaagccaggacaggcccctgtacttgtcatctatggtaaaaacaaccggccctcagggatcccagaccgattctctggctccagctcaggaaacacagcttccttgaccatcactggggctcaggcggaagatgaggctgactattactgtaactcccgggacagcagtggtaaccgggtgttcggcggagggaccaagctgaccgtcctag

SEQ ID NO: 8100 - DNA, 328 bp, Homo sapiens
cagactgtggtgactcaggagccctcactgactgtgtccccaggagggacagtcactctcacctgtgcttccagcactggagcagtcacaagtggtaactctccaaactggttccagcagaaacctggacaagcacccagggcactgatttatagaacaagcaacaaacactcctggacccctgcccggttctcaggctccctccttgggggcaaagctgccctgacactgtcaggtgtgcagcctgaggacgaggctgagtattactgcctgctctactatggtggtgcttatgtcttcggaactgggaccaaggtcaccgtcctag

SEQ ID NO: 8101 - DNA, 337 bp, Homo sapiens
gacatcgtgatgacccagtctccagactccctggctgtgtctctgggcgagagggccaccatcaactgcaagtccagccagagtgttttatacagctccaacaataagaactacttagcttggtaccagcagaaaccaggacagcctcctaagctgctcatttactgggcatctacccgggaatccggggtccctgaccgattcagtggcagcgggtctgggacagatttcactctcaccatcagcagcctgcaggctgaagatgtggcagtttattactgtcagcaatattatagtactccctctttcggcggagggaccaaggtggagatcaaac

SEQ ID NO: 8102 - DNA, 322 bp, Homo sapiens; identical to SEQ ID NO: 1641

SEQ ID NO: 8103 - DNA, 319 bp, Homo sapiens
tcctatgagctgactcagccaccctcagtgtccgtgtccccaggacagacagccagcatcacctgctctggagataaattgggggataaatatgcttgctggtatcagcagaagccaggccagtcccctgtgctggtcatctatcaagatagcaagcggccctcagggatccctgagcgattctctggctccaactctgggaacacagccactctgaccatcagcgggacccaggctatggatgaggctgactattactgtcaggcgtgggacagcagcactggagtcttcggaactgggaccaaggtcaccgtcctag

SEQ ID NO: 8104 - DNA, 319 bp, Homo sapiens
tcctatgagctgactcagccaccctcagtgtccgtgtccccaggacagacagccagcatcacctgctctggagataaattggggaataaatatgcttgctggtatcagcagaagccaggccagtcccctgtgctggtcatctatcaagatagtaagcggccctcagggatccctgagcgattctctggctccaactctgggaacacagccactctgaccatcagcgggacccaggttatggatgaggctgactattactgtcaggcgtgggacagcaacactgctgtcttcggaactgggaccaaggtcaccgtcctag

SEQ ID NO: 8105 - DNA, 325 bp, Homo sapiens
tcctatgagctgacacagccaccctcggtgtcagtgtccccaggacagacggccaggatcacctgctctggagatgcattgccaaagcaatatacttattggtaccagcagaagccaggccaggcccctgtgctgctgatatataaagacagtgagaggccctcagggatccctgagcgattctctggctccacctcagggacaacagtcacatttaccatcagtggagtccagtcagaagacgaggctgactattactgtcaatcagcagacagcagtggtgcttattgggtgttcggcggagggaccaagctgaccgtcctag

SEQ ID NO: 8106 - DNA, 322 bp, Homo sapiens
tcctatgagctgactcagccaccctcagtgtccgtgtccccaggacagacagccagcatcacctgctctggagataaattgggggataaatatgcttgctggtatcagcagaagccaggccagtcccctgtgctggtcatctatcaagataccaagcggccctcagggatccctgagcgattctctggctccaactctgggaacacagccactctgaccatcagcgggacccaggctatggatgaggctgactattactgtcaggcgtgggacggcagcactgggggggtcttcggaactgggaccaaggtcaccgtcctag

SEQ ID NO: 8107 - DNA, 319 bp, Homo sapiens
tcctatgagctgactcagccaccctcagtgtccgtgtccccaggacagacagccagcatcacctgctctggagataagttgggggataagtttgcttgctggtatcagcagaagccaggccagtcccctgtgctggtcatctatcaagatagcaagcggccctcagggatccctgagcgattctctggctccaactctgggaacacagccagtctgaccatcagcgggacccaggctatggatgaggctgactattactgtcaggcgtgggccagcagcactggagtattcggcggagggaccaagctgaccgtcctag

SEQ ID NO: 8108 - DNA, 328 bp, Homo sapiens
tcctatgagctgacacagccaccctcggtgtcagtgtccccaggacagacggccaggatcacctgctctggagatgcattgccaaagcaatatgcttattggtaccagcagaagccaggccaggcccctgtgctggtgatatataaagacagtgagaggccctcagggatccctgagcgattctctggctccagctcagggacaacagtcacgttgaccatcagtggagtccaggcagaagacgaggctgactattactgtcaatcagcagacagcagtggtacttatccttgggtattcggcggagggaccaagctgaccgtcctag

SEQ ID NO: 8109 - DNA, 321 bp, Homo sapiens
gacatccagttgacccagtctccatccttcctgtctgcatctataggagacagagtcaccatcacttgccgggccagtcagggcattagcagttatttagcctggtatcagcaaaaaccagtgaaagcccctaagctcctgatctatgctgcatccactttgcaaagtggggtcccatcaaggttcagcggcagtggatctgggacagaattcactctcacaatcagcagcctgcagcctgaagattttgcaacttattactgtcaacagcttaatagttacccgctcactttcggcggagggaccaaggtggagatcaaa

SEQ ID NO: 8110 - DNA, 325 bp, Homo sapiens
gaaattgtgttgacgcagtctccaggcaccctgtctttgtctccaggggaaggagccaccctctcctgcagggccagtcagcgtgttagcagcagctacttagcctggtaccagcacaaacctggccaggctcccaggctcctcatctatggtgcgtccagcagggccgctggcatcccagacaggttcagtggcagtgggtctgggacagacttcattctcaccatcagcagactggagcctgaagattctgcagtgtattactgtcagcagtatggtagttcacttcggacgttcggccaagggaccaaggtggaaatcaaac

SEQ ID NO: 8111 - DNA, 325 bp, Homo sapiens
gaaattgtgttgacgcagtctccaggcaccctgtctttgtctccaggggaaagagccaccctctcctgcagggccagtcagagtgttagcagcagctacttagcctggtaccagcagaaacctggccaggctcccaggctcctcatctatggtgcatccagcagggccactggcatcccagacaggttcagtggcagtgggtctgggacagacttcactctcaccatcagcagactggagcctgaagattttgcagtgtattactgtcagcagtatggtagctcaccgaggacgttcggccaagggaccaaggtggaaatcaaac

SEQ ID NO: 8112 - DNA, 340 bp, Homo sapiens
gacatcgtgatgacccagtctccagactccctggctgtgtctctgggcgagagggccaccgtcaactgcaagtccagccagagtgttttctatagctccaataataagaattacttaggttggtaccagcagaagccagggcagcctcctaagctgctcattaactgggcatctacccgggaatccggggtccctgaccgattcagtggcagcgggtctgggacagatttcactctcaccatcagcagcctgcaggctgaagatgtggcagtttattactgtcagcaatattatagtactccgctcactttcggcggagggaccaaagtggagatcaaac

SEQ ID NO: 8113 - DNA, 337 bp, Homo sapiens
aattttatgctgactcagccccagtctgtgtcggagtctccggggaagacggtaaccatctcctgcaccggcagcagtggcagcattgccagcaactatgtgcagtggtaccagcagcgcccgggcagtgcccccactagtgtgatctatgaggataaccaaagaccctctggggtccctgatcggttctctggctccatcgacagctcctccaactctgcctccctcaccatctctggactgaagactgaggacgaggctgactactactgtcagtcttatgatagcagcaatgggaattgggtgttcggcggagggaccaagctgaccgtcctag

SEQ ID NO: 8114 - DNA, 331 bp, Homo sapiens
cagtctgtgctgactcagccaccctcagcgtctgggacccccgggcagagggtcaccgtctcttgttctggaagcagctccaacatcggaagtaattatgtatactggtaccagcagctcccaggaacggcccccaaactcctcatctataggaataatcagcggccctcaggggtccctgaccgattctctggctccaagtctggcacctcagcctccctggccatcagtgggctccggtccgaggatgaggctgattattactgtgcagcatgggatgacagcctgagtggtgtggtattcggcggagggaccaagctgaccgtcctag

SEQ ID NO: 8115 - DNA, 337 bp, Homo sapiens
gaaattgtgatgacccagactccactctccctgcccgtcacccctggagagccggcctccatctcctgcaggtctagtcagagcctcttggatagggataatggaaacacctatttggactggtacctgcagaaggcagggcagtctccacagctcctgatctatacgctttcctatcgggcctctggagtcccagacaggttcagcggcagtgggtcaggcactgatttcacactgaaaatcagcagggtggaggctgaggatgttggagtttattactgcatgcaacgcaaagagtttccctcatttggccaggggaccaagctggagatcaaac

SEQ ID NO: 8116 - DNA, 322 bp, Homo sapiens
gacatccagatgacccagtctccatcctccctgtctgcatctgttggagacagagtcaccatcacttgccggtcaagtcagagcattaggacctatttaaattggtatcagcagaaaccagggaaagcccctaggctcctgatctatgctgcatccagtttgcaaagtggggtcccatcaaggttcagtggcagtggatctgggacagatttcactctcaccatcagcagtctgcaacctgaagattttgcaacttactactgtcaacagagttacagtatgcctcggacttttggccaggggaccaagctggagatcaaac

SEQ ID NO: 8117 - DNA, 322 bp, Homo sapiens
gaaattgtgttgacgcagtctccaggcaccctgtctttgtctccaggggaaagagccaccctctcctgcagggccagtcagagtgttagcagcagctacttagcctggtaccagcagaaacctggccaggctcccaggctcctcatctatggtgcatccagcagggccactggcatcccagacaggttcagtggcagtgggtctgggacagacttcactctcaccatcagcagactggagcctgaagattttgcagtgtattactgtcagcagtatggtagtcctgggacgttcggccaagggaccaaggtggaaatcaaac

SEQ ID NO: 8118 - DNA, 328 bp, Homo sapiens
gaaattgtgttgacacagtctccagccaccctgtctttgtctccaggggaaagagccaccctctcctgcagggccagtcagagtgttagcagctacttagcctggtaccaacagaaacctggccaggctcccaggctcctcatctatgatgcatccaacagggccactggcatcccagccaggttcagtggcagtgggtctgggacagacttcactctcaccatcagcagcctagagcctgaagattttgcagtttattactgtcagcagcgtagcaactggcctcccctcctcactttcggcggagggaccaaggtggagatcaaac

SEQ ID NO: 8119 - DNA, 334 bp, Homo sapiens
cagtctgtgctgacgcagccgccctcagtgtctggggccccagggcagagggtcaccatctcctgcgctgggagcaactccaacatcggggcaggttatgatgtacactggtaccagcagcttccaggaacagcccccaaactcctcatctttggtcacaacaatcggccctcaggggtccctgaccgattctctggctccaagtctgacacctcagcctccctggccatcactgggctccaggctgaggatgaggctgattattactgccagtcctatgacagcagcctgagtgatgtgatattcggcggagggaccaagctgaccgtcctag

SEQ ID NO: 8120 - DNA, 340 bp, Homo sapiens
gacatcgtgatgacccagtctccagactccctggctgtgtctctgggcgagagggccaccatcaactgcaagtccagccagagtgttttatacagctccaacagtaagaactacttagcttggtaccagcagaaaccaggacagcctcctaagctgctcatttactgggcatctacccgggaatccggggtccctgaccgattcagtggcagcgggtctgggacagatttcactctcaccatcagcagcctgcaggctgaagatgtggcagtttattactgtcagcaatattatagtgttcctcacactttcggcggagggaccaaggtggagatcaaac

SEQ ID NO: 8121 - DNA, 322 bp, Homo sapiens
gaaatagtgatgacgcagtctccagccaccctgtctgtgtctccaggggaaggagccaccctctcctgcagggccagtcagagtgttagcagccgcttagcctggtaccagcagaaacctggccaggctcccaggctcctcatctatggtgcatctaccagggctactggtatcccagccaggttcagtggcagtgggtctgggacagagttcactctcgccatcagcagcctgcagtctgaagattttgcagtttattactgtcagcagtataatacctggcctcgggcgttcggccaagggaccaaggtggaaatcaaac

SEQ ID NO: 8122 - DNA, 325 bp, Homo sapiens
tcctatgtgctgactcagccaccctcggtgtcagtggccccaggacagacggccaggattacctgtgggggaaacatcagtggaggtcaaagtgtgcactggtaccagcagaagccaggccaggcccctgtgctggtcgtctatgatgatagcgaccggccctcagggatccctgagcgattctctggcaccaactctgggaacacggccgccctgaccatcagcagggttgaggccggggatgaggccgactattactgtcaggtgtgggatagtggtcgtgatcttgtggtcttcggcggagggaccaagctgaccgtcctag

SEQ ID NO: 8123 - DNA, 319 bp, Homo sapiens
gaaatagtgatgacgcagtctccagccaccctgtctgtgtctccaggggaaagagccaccctctcctgcagggccagtcagagtgttagcagcaacttagcctggtaccagcagaaacctggccaggctcccaggctcctcatctatggtgcatccaccagggccactggtatcccagccaggttcagtggcagtgggtctgggacagagttcactctcaccatcagcagcctgcagtctgaagattttgcagtttattactgtcagcagtataataacttaaggacgttcggccaagggaccaaggtggaaatcaaac

SEQ ID NO: 8124 - DNA, 329 bp, Homo sapiens
cagtctgccctgattcagcctgcctccgtgtctgggtctcctggacagtcgatcaccatctcctgcagtggaaccagcagtgacgttggtggttataagtatgtctcgtggtaccaacagtacccaggcagagcccccaaactcatgatttatgatgtcggtagtcggctcccaggggtttctgatcgcttctctggctccaagtctggcaacacggcctccctgaccatctcttggctccaggctgaggacgaggctgattattactgcagctcatatacaagcaccagcacggtggtattcggcggagggaccagactgaccgtcct

SEQ ID NO: 8125 - DNA, 319 bp, Homo sapiens
tcctatgagctgactcagccaccctcagtgtccgtgtccccaggacagacagccagcatcacctgctctggagataaattgggggataaatatgcttgttggtatcagcagaagccaggccagtcccctgtgctggtcatctatcaagataccaagcggccctcagggatccctgagcgattctctggctccaactctgggaacacagccactctgaccatcagcgggacccaggctatggatgaggctgactattactgtcaggcgtgggacagcagcactgcggtattcggcggagggaccaagctgaccgtcctag

SEQ ID NO: 8126 - DNA, 325 bp, Homo sapiens
tcctatgtgctgactcagccaccctcagtgtcagtggccccaggaaagacggccaggattacctgtgggggaaacaacattggaagtaaaagtgtgcactggtaccagcagaagccaggccaggcccctgtgctggtcatctattatgatagcgaccggccctcagggatccctgagcgattctctggctccaactctgggaacacggccaccctgaccatcagcagggtcgaagccggggatgaggccgactattactgtcaggtgtgggatagtagtagtgatcattatgtcttcggaactgggaccaaggtcaccgtcctag

SEQ ID NO: 8127 - DNA, 322 bp, Homo sapiens
gaaattgtgctgactcagtctccacactttcagtctgtgattccaaaggagacagtcaccatcacctgccgggccagtcagagcattggtaatagcttacactggtatcagcagaaaccagatcagtctccaaagctcctcatcaagtatgcttcccagtccttctccggggtcccctcgcggttcagtggcagtggatctgggacagatttcaccctcaccatcaatagcctggaggctgaagatgctgcaacgtattactgtcatcagagtagtcgttacccgtacacttttggccaggggacccagctggagatcaaac

SEQ ID NO: 8128 - DNA, 333 bp, Homo sapiens
cagtctgccctgactcagcctgcctccgtgtctgggtctcctggacagtcgatcaccatctcctgcactggaaccagcagtgacgttggtttttataactatgtctcctggtaccaacagcacccaggcaaagcccccaaactcatgatttatgatgtcagtaatcggccctcaggggtttctaatcgcttctctggctccaagtctggcaacacggcctccctgaccatctctgggctccaggctgaggacgaggctgattattactgcaactcatatacaaccagcagtactctttatgtcttcggaactgggaccaaggtcaccgtccta

SEQ ID NO: 8129 - DNA, 322 bp, Homo sapiens
gaaattgtgttgacacagtctccagccaccctgtctctgtctccaggggaaagagccaccctctcctgcagggccagtcagagtgttagcaggtacttagcctggtaccaacagaaacctggccaggctcccaggctcctcatctatgatgcatccaacagggccactggcatcccagccaggttcagtggcagtgggtctgggacagacttcactctcaccatcagcagcctagagcctgaagattttgcagtttattactgtcagcagcgtgacatctggcctatcaccttcggccaagggacacgactggagattaaac

SEQ ID NO: 8130 - DNA, 328 bp, Homo sapiens
tcttctgagctgactcaggaccctgctgtgtctgtggccttgggacagacagtcaggatcacatgccaaggagacagcctcagaagctattatgcaagctggtaccagcagaagccaggacaggcccctgtacttgtcatctatggtaaaaacaaccggccctcagggatcccagaccgattctctggctccagctcaggaaacacagcttccttgaccatcactggggctcaggcggaagatgaggctgactattactgtaactcccgggacagcagtggtaaccatctagtggtattcggcggagggaccaagctgaccgtcctag

SEQ ID NO: 8131 - DNA, 319 bp, Homo sapiens
tcctatgagctgactcagccaccctcagtgtccgtgtccccaggacagacagccagcatcacctgctctggagataaattgggggataaatatgcttgctggtatcagcagaagccaggccagtcccctgtgctggtcatctatcaagatagcaagcggccctcagggatccctgagcgattctctggctccaactctgggaacacagccactctgaccatcagcgggacccagactatggatgaggctgactattactgtcaggcgtgggacagcagcactggagtcttcggaactgggaccaaggtcaccgtcctag

SEQ ID NO: 8132 - DNA, 319 bp, Homo sapiens
tcctatgagctgactcagccaccctcagtgtccgtgtccccaggacagacagccaacatcacctgctctggagataaattgggggataaatttgcttgctggtatcagcagaagccaggccagtcccctgtactggtcatctatgaagatagcaagcggccctcagggatccctgagcgattctctggctccaactctgggaacacagccactctgaccatcagcgggacccaggctatggatgacgctgactattactgtcaggcgtgggacagcagcactgcggtattcggcggagggaccaagctgaccgtcctag

SEQ ID NO: 8133 - DNA, 332 bp, Homo sapiens
cagtctgtgttgacgcagccgccctcagtgtctgcggccccaggacagaaggtcaccatctcctgctctggaagcagctccaacattgggaataattatgtatcctggtaccagcagctcccaggaacagcccccaaactcctcatttatgacaataataagcgaccctcagggattcctgaccgattctctggctccaagtctggcacgtcagccaccctgggcatcaccggactccagactggggacgaggccgattattactgcggaacatgggatagcagcctgagtgctggcggtattcggcggagggaccaagctgaccgtcctag

SEQ ID NO: 8134 - DNA, 322 bp, Homo sapiens
gacatccagatgacccagtctccatcctccctgtctgcatctgtaggagacagagtcaccatcacttgccgggcaagtcagagcattagcagctatttaaattggtatcagcagaaaccagggaaagcccctaagctcctgatctatgctgcatccagtttgcaaagtggggtcccatcaaggttcagtggcagtggatctgggacagatttcactctcaccatcagcagtctgcaacctgaagattttgcaacttactactgtcaacagagttacagtacccctaaaacgttcggccaagggaccaaggtggaaatcaaac

SEQ ID NO: 8135 - DNA, 328 bp, Homo sapiens
gaaatagtgatgacgcagtctccagccaccctgtctgtgtctccaggggaaagagccaccctctcctgcagggccagtcagagtgttagcagcaacttagcctggtaccagcagaaacctggccaggctcccaggctcctcatctatggtgcatctaccagggccactagtatcccagccaggttcagtggcagtgggtctgggacagagttcactctcaccatcagcagcctgcagtctgaagattttgcagtttattactgtcagcagtataataactggcctccggaaatcaccttcggccaagggacacgactggagattaaac

SEQ ID NO: 8136 - DNA, 322 bp, Homo sapiens
gacatccagatgacccagtctccatcctccctgtctgcatctttaggagacagagtcaccatcacttgccaggcgagtcaggacattagcaactatttaagttggtatcagcagaaaccaggaaaagcccctaagctcctgatctacgatgcatccaatttggaaacaggggtcccatcaaggttcagtggaagtggatctgggacagattttactttcaccatcagcagcctgcagcctgaagatattgcaacattttactgtcaacagtatgataatctcccgctcactttcggcggagggaccaaggtggagatcaaac

SEQ ID NO: 8137 - DNA, 340 bp, Homo sapiens
gacatcgtgatgacccagtctccagactccctggctgtgtctctgggcgagagggccaccatcaactgcaagtccagccagagtgttttatacagctccaacaataagaactacttagcttggtaccagcagaaaccaggacagcctcctaagctgctcatttactgggcatctacccgggaatccggggtccctgaccgattcagtggcagcgggtctgggacagatttcactctcaccatcagcagcctgcaggctgaagatgtggcagtttattactgtcagcaatattatagtactttgtggacgttcggccaagggaccaaggtggaaatcaaac

SEQ ID NO: 8138 - DNA, 331 bp, Homo sapiens
cagtctgtgttgacgcagccgccctcagtgtctgcggccccaggacagaaggtcaccatctcctgctctggaagcagctccaacattgggaataattatgtatcctggtaccagcagctcccaggaacagcccccaaactcctcatttatgacaataataagcgaccctcagggattcctgaccgattctctggctccaagtctggcacgtcagccaccctgggcatcaccggactccagactggggacgaggccgattattactgcggaacatgggatagcagcctgagtgtttatgtcttcggaactgggaccaaggtcaccgtcctag

SEQ ID NO: 8139 - DNA, 327 bp, Homo sapiens
gaaattgtgttgacgcagtctccaggcaccctgtctttgtctccaggggaaagagccaccctctcctgcagggccagtcagagtgttagcagcagctacttagcctggtaccagcagaaacctggccaggctcccaggctcctcatctatggtgcatccagcagggccactggcatcccagacaggttcagtggcagtgggtctgggacagacttcactctcaccatcagcagactggagcctgaagattttgcagtgtattactgtcagcagtatggtagctcacctccgaaacttttggccaggggacctagctgcagatcaaac

SEQ ID NO: 8140 - DNA, 325 bp, Homo sapiens
gaaattgtgttgacgcagtctccaggcaccctgtctttgtctccaggggaaagagccaccctctcctgcagggccagtcagagtgttagcagcatctacttagcctggtaccagcagaaacctggccaggctcccaggctcctcatctatggtgcatccagcagggccactggcatcccagacaggttcagtggcagtgggtctggtacagacttcactctcaccatcagcagactggagcctgaagattttgcagtgtattactgtcagcagtatggtagctcaccgtggacgttcggccaagggaccaaggtggaaatcaaac

SEQ ID NO: 8141 - DNA, 328 bp, Homo sapiens
cagactgtggtgactcaggagccctcactgactgtgtccccaggagggacagtcactctcacctgtgcttccagcactggagcagtcaccagtggttactatccaaactggttccagcagaaacctggacaagcacccagggcactgatttatagtacaagcaagaaacactcctggacccctgcccggttctcaggctccctccttgggggcaaagctgccctgacactgtcaggtgtgcggcctgaggacgaggctgagtattactgcctcctctactatggtggttctcaggtattcggcggagggaccaggctgaccgtcctag

SEQ ID NO: 8142 - DNA, 334 bp, Homo sapiens
cagtctgccctgactcagcctccctccgcgtccgggtctcctggacagtcagtcaccatctcctgcactggaaccagcagtgacattggtgcttataactatgtctcctggtaccaacaatacccaggcaaagcccccaacctcatgatttatgaggtcactaagcggcccccaggggtccctgatcgcttctctggctccaagtctggcaacacggcctccctgaccgtctctgggctccaggctgaggatgaggctgattattactgcgcgtcatatgcaggcgataacaattggaagattttcggcggagggaccaagctgaccgtcctag

SEQ ID NO: 8143 - DNA, 322 bp, Homo sapiens
gacatccagatgacccagtctccatcctcactgtctgcatctgtaggagacagagtcaccatcacttgtcgggcgagtcagggcattagcaattatttagcctggtttcagcagaaaccagggaaagcccctaagtccctgatctatgctgcatccagtttgcaaagtggggtcccatcaaagttcagcggcagtggatctgggacagatttcactctcaccatcagcagcctgcagcctgaagattttgcaacttattactgccaacagtataatagttaccctccgacgttcggccaagggaccaaggtggaaatcaaac

SEQ ID NO: 8144 - DNA, 322 bp, Homo sapiens
gacatccagatgacccagtctccttccaccctgtctgcatctgtcggagacagagtcaccatcacttgccgggccagtcaaagtattagtaagtggttggcctggtatcagcaaaaaccggggaaagcccctaatctcctgatctataaggcgtctactttagaaagtggggtcccatcaaggttcagcggcagtgcatctgggacagaattcactctcaccatcagcagcctgcagtctgatgactctgcaagttattattgtcaacagtatgattcttttccgtggacgttcggccaagggaccaaggtggaagtcaaac

SEQ ID NO: 8145 - DNA, 322 bp, Homo sapiens; identical to SEQ ID NO: 7961

SEQ ID NO: 8146 - DNA, 319 bp, Homo sapiens
tcctatgagctgacacagccaccctcggtgtcagtgtccccaggacaaacggccaggatcacctgctctggagatgcattgccaaaaaaatatgcttattggtaccagcagaagtcaggccaggcccctgtgctggtcatctatgaggacagcaaacgaccctccgggatccctgagagattctctggctccagctcagggacaatggccaccttgactatcagtggggcccaggtggaggatgaagctgactactactgttcctcaacagacggcagtggtagggtattcggcggagggaccaagctgaccgtcctag

SEQ ID NO: 8147 - DNA, 325 bp, Homo sapiens
gaaatagtgatgacgcagtctccagtctccctgtctgtgtctccaggggaaagagccaccctctcctgcagggccagtcagagtgttagcagcaacttagcctggtaccagcagagacctggccaggctcccaggctcctcatctatggtgcatccaccagggccactggtgtcccagccaggttcagtggcagtgggtcagggacagacttcactctcaccatcagcagcctgcagtctgaagattttgcagtttattactgtcagcagtatagtgactggcctccgtggacgttcggccaagggaccaaggtggaaatcaaac

SEQ ID NO: 8148 - DNA, 325 bp, Homo sapiens
gacatccagatgacccagtctccatcctccctgtctgcatctgtaggagacagagtcaccatcacttgccgggcaagtcagagcattagcagctatttaaattggtatcagcagaaaccagggaaagcccctaagctcctgatctatggtacatccagtttgcaaagtggggtcccatcaaggttcagtggcagtggatctgggacagatttcactctcaccatcagcagtctgcaacctgaagattttgcaacttactactgtcaacagagttacagtacccccccgtggacgttcggccaagggaccaaggtggaaatcaaac

SEQ ID NO: 8149 - DNA, 320 bp, Homo sapiens
catccagatgacccagtctccatcctccctgtctgcatctgtaggagacagagtcaccatcacttgccgggcaagtcagagcattagcagctatttaaattggtatcagcagaaaccagggaaagcccctaagctcctgatctatgctacatccaatttgcaaagtggggtcccatcaaggttcagtggcagtgagtctgggacagatttcactctcaccatcagtagtctgcaacctgaagattttgcaacttacttctgtctacagacttacagtacccctcggacttttggccaggggaccaagctggaggtcaaac

SEQ ID NO: 8150 - DNA, 320 bp, Homo sapiens
tcctatgagctgactcagccaccctcagtgtccgtgtccccaggacagacagccagcatcacctgctctggagataaattgggggagaaatatgcttgctggtatcagcagaagccaggccagtcccctgtgctggtcatgtatcaagatgacaagcggccctcagggatccctgagcgattctctggctccaactctgggaacacagccactctgaccatcagcgggacccaggctatggatgaggctgactattactgtcaggcgtgggccagcagcacttatgtggtattcggcggagggaccaagctgaccgtcct

SEQ ID NO: 8151 - DNA, 319 bp, Homo sapiens
gaaattgtgttgacgcagtctccaggcaccctgtctttgtctccaggggaaagagccaccctctcctgcagggccagtcagagtgttagcagcagctacttagcctggtaccagcagaaacctggccaggctcccaggctcctcatctatggtgcatccagcagggccactggcatcccagacaggttcagtggcagtgggtctgggacagacttcactctcaccatcagcagactggagcctgaagattttgcagtgtattactgtcagcacccccgagaattcactttcggccctgggaccaaagtggatatcaaac

SEQ ID NO: 8152 - DNA, 322 bp, Homo sapiens
tcctatgagctgactcagccaccctcagtgtccgtgtccccaggacagacagccaccatcacctgctctggagataaattgggggataaatatgcttgctggtatcagcagaagacaggccagtcccctatgctggtcatctatcaagataccaagcggccctcagggatccctgagcgattctctggctccaactctgggaacacagccactctgaccatcagcgggacccaggctatggatgaggctgactattactgtcaggcgtgggacagcagcacttctgtggtattcggcggagggaccaagctgaccgtcctag

SEQ ID NO: 8153 - DNA, 325 bp, Homo sapiens
gccatccagttgacccagtctccatcctccctgtctgcatctgtaggagacagagtcaccatcacttgccgggcaagtcagggcattagcagtgctttagcctggtatcagcagaaaccagggaaagctcctaggctcctgatctatgatgcctccagtttggaaagtggggtcccatcaaggttcagcggcagtggatctgggacagatttcactctcaccatcagcagcctgcagcctgaagattttgcaacttactactgtcaacagagttacagtacccccccgtggacgttcggccaagggaccaaggtggaaatcaaac

SEQ ID NO: 8154 - DNA, 325 bp, Homo sapiens
gacatccagatgacccagtctccatcctccctgtctgcatctgtgggggacagagtcaccatcacttgccgggcaagtcagagcattcgcagttatttaagttggtatcagcagaaaccagggaaagcccctaagctcctgatctatggtgcatccagtttgcaaaatggggtcccatcaagtttcagtggcagtggatctgggacaaatttcactctcaccatcagcaatctgcaacctgaagattttgcaacttactactgtcaacagagttacagtacccccccgtggacgttcggccaagggaccaaggtggaaatcaaac

SEQ ID NO: 8155 - DNA, 322 bp, Homo sapiens; identical to SEQ ID NO: 925

SEQ ID NO: 8156 - DNA, 328 bp, Homo sapiens
gaaattgtgttgacacagtctccagccaccctgtctttgtctccaggggaaagagccaccctctcctgcagggccagtcagagtgttagcagctacttagcctggtaccaacagaaacctggccaggctcccaggctcctcatctatgatgcatccaacagggccactggcatcccagccaggttcagtggcagtgggtctgggacagacttcactctcaccatcagcagcctagagcctgaagattttgcagtttattactgtcagcagcgtagcaactggcctcgggggatcactttcggcggagggaccaaggtggagatcaaac

SEQ ID NO: 8157 - DNA, 322 bp, Homo sapiens
gacatccagatgacccagtctccatcttctgtgtctgcatctgtaggagacagagtcaccatcacttgtcgggcgagtcagggtattagcagctggttagcctggtatcagcagaaaccagggaaagcccctaagctcctgatctatgcttcatccactttgcaaagtggggtcccatcaaggttcagcggcagtgaatctgggacagatttcactctcactatcagcagcctgcaggctgaagattttgcaacttactattgtcaacaggctcacagtttcccgtacacttttggccaggggaccaagctggagatcaaac

SEQ ID NO: 8158 - DNA, 328 bp, Homo sapiens
gaaattgtgttgacgcagtctccaggcaccctgtctttgtctccaggggaaagagccaccctctcctgcagggccagtcagagtgttagcagcagctacttagcctggtaccagcagaaacctggccaggctcccaggctcctcatctatggtgcatccagcagggccactggcatcccagacaggttcagtggcagtgggtctgggacagacttcactctcaccatcagcagactggagcctgaagattttgcagtgtattactgtcagcagtatggtagctcacctctgtggacgttcggccaagggaccaaggtggaaatcaaac

SEQ ID NO: 8159 - DNA, 322 bp, Homo sapiens
tcctatgagctgactcagccaccctcagtgtccgtgtccccaggacagacagccagcatcacctgctctggagataaattgggggataaatatgcttgctggtatcagcagaagccaggccagtcccctgtgctggtcatctatcaagatagcaagcggccctcagggatccctgagcgattctctggctccaactctgggaacacagccactctgaccatcagcgggacccaggctatggatgaggctgactattactgtcaggcgtgggacagcagcagggatgtggtattcggcggagggaccaagctgaccgtcctag

SEQ ID NO: 8160 - DNA, 328 bp, Homo sapiens
gaaatagtgatgacgcagtctccagccaccctgtctgtgtctccaggggaaagagccaccctctcctgcagggccagtcagagtgttagcagcaacttagcctggtaccagcagaaacctggccaggctcccaggctcctcatctatggtgcatccaccagggccactggtatcccagccaggttcagtggcagtgggtctgggacagagttcactctcaccatcagcagcctgcagtctgaagattttgcagtttattactgtcagcagtataataactggcctcccgagtacacttttggccaggggaccaagctggagatcaaac

SEQ ID NO: 8161 - DNA, 320 bp, Homo sapiens
gaaatagtgatgacgcagtctccagccaccctgtctgtgtctccaggggaaggagccaccctctcctgcagggccagtcagagtgttggcagcaacttagcctggtaccagcagaaacctgggcggcctcccagactcctcatctatgcttcatcctccagggccgctggtgtcccagccaagttcagtggcagtgggtctgggacagagttcactctcaccatcagcagcctgcagtctgaagattttgcagtctattactgtcaacaacacgctaactggcctctctccttcggcggagggaccaaggtggacatcaa

SEQ ID NO: 8162 - DNA, 322 bp, Homo sapiens
gaaattgtgttgacacagtctccagccaccctgtctttgtctccaggggaaagagccaccctctcctgcagggccagtcagagtgttagcagctacttagcctggtaccaacagaaacctggccaggctcccaggctcctcatctatgatgcatccaacagggccactggcatcccagccaggttcagtggcagtgggtctgggacagacttcactctcaccatcagcagcctagagcctgaagattttgcagtttattactgtcagcagcgtagcaactggcctcagacttttggccaggggaccaagctggagatcaaac

SEQ ID NO: 8163 - DNA, 322 bp, Homo sapiens; identical to SEQ ID NO: 2631

SEQ ID NO: 8164 - DNA, 322 bp, Homo sapiens
gtcatctggatgacccagtctccatccctactctctgcatctacaggagacagagtcaccatcagttgtcggatgagtcagggcattaacagttatttagcctggtatcagcaaaaaccagggaaagcccctgagctcctgatctatggtgcatccactttgcaaggtggggtcccatcaaggttcagtggcactggatctgggacagatttcactctcaccatcagttctctgcagtctgaagattttgcaatttattactgtcaacagtattatagtttcccttggacgttcggccaagggaccaaggtggacatcaaac

SEQ ID NO: 8165 - DNA, 334 bp, Homo sapiens
cagtctgtgctgactcagccaccctcagcgtctgggacccccgggcagagggtcaccatctcttgttctggaagcagctccaacatcggaagtaattatgtatactggtaccagcagctcccaggaacggcccccaaactcctcatctataggaataatcagcggccctcaggggtccctgaccgattctctggctccaagtctggcacctcagcctccctggccatcagtgggctccggtccgaggatgaggctgattattactgtgcagcatgggatgacagcctgagtggtcgaggtgtcttcggaactgggaccaaggtcaccgtcctag

SEQ ID NO: 8166 - DNA, 322 bp, Homo sapiens
tcctatgacctgactcagccaccctcagtgtccgtgtccccaggacagacagccagcatcacctgctctggagataaattggggaataaatatgtttgctggtatcagcagaagccaggccagtcccctgtgctggtcatctatgaagataacaagcggccctcagggatccctgagcgattctctggctccaactctgggaacacggccactctgaccatcagcgggacccaggctatggatgaggctgactattactgtcagacgtgggacagcagcactggagtggtgttcggcggagggaccaagctgaccgtcctag

SEQ ID NO: 8167 - DNA, 335 bp, Homo sapiens
cagtctgtgctgacgcagccgccctcagtgtctggggccccagggcagagggtcaccatctcctgcactgggagcagttccaacatcggggcaggttttgatgtacactggtaccagcagcttccaggaacagcccccaaactcctcatctatcgtaacaccaatcggccctcaggggtccctgaccgattctctggctccaagtctggcacctcagcctccctggccatcactgggctccaggctgaggatgaggctgattattactgccagtcctatgacaacagcctgagtggtcgttgggtattcggcggagggaccaagctgaccgtcct

SEQ ID NO: 8168 - DNA, 322 bp, Homo sapiens; identical to SEQ ID NO: 3391

SEQ ID NO: 8169 - DNA, 322 bp, Homo sapiens
gacatccagatgacccagtctccatcctccctgtctgcatctgtaggagacagagtcaccatcacttgccaggcgagtcaggacattagcaactatttaaattggtatcagcagaaaccagggaaagcccctaaactcctcatctacgatgcatccaatttggaaacaggggtcccatcaaggttcagtggaagtggatctgggacagattttactttcaccatcagcagcctgcagcctgaagatattgcaacatattactgtcaacagtatgatgatctcccgctcactttcggcggagggaccaaggtggagatcaaac

SEQ ID NO: 8170 - DNA, 322 bp, Homo sapiens
gaaatagtgatgacgcagtctccagccaccctgtctgtgtctcctggggaaagagccaccctcgcctgcagggccagtcagagtattagcagcaagttagcctggtaccagcagaaacctggccaggctcccaggctcctcatctatggtgcatccaccagggccactggcatcccagccaggttcagtggcagtgggtctgggacggaattcactctcaccatcagcagcctgcagtctgaagattttgcactttattactgtcagcagtataatacctggcctccgtacacttttggccaggggaccaagctggagatca

SEQ ID NO: 8171 - DNA, 324 bp, Homo sapiens
cagtctgtgctgacgcagccgccctcagtgtctggggccccagggcagagggtcaccatctcctgcactgggagcagctccaacatcggggcaggttatggtgtacactggtaccagcagcttcctggaacagcccccagactcctcatttatggtaacagcaatcgaccctcaggggtccctgaccgattctctggctccaagtctggcacctcagcctccctggccatcactgggctccaggctgaggatgaggctgattattactgccagtcctatgacagcagcctggtattcggcggagggaccaagctgaccgtccta

SEQ ID NO: 8172 - DNA, 322 bp, Homo sapiens
gacatccagatgacccagtctccatcctccctgtctgcatctgtaggagacagagtcaccatcacttgccgggcaagtcagaacattaacaactatttaatttggtatcagcagaagccagggaaagcccctaagctcctgatctatgctgcatccagtttgcaaagtggggtcccatcaaggttcagtggcagtggatctgggacagatttcactctcaccatcagcagtctgcaacctgaagattttgcaacttactactgtcaacagagttacagtacccctccgatctccttcggccaagggacacgactggagatta

SEQ ID NO: 8173 - DNA, 334 bp, Homo sapiens
cagtctgtgctgacgcagccgccctcagtgtctggggccccagggcagagggtcaccatctcctgcactgggagcaactccaacatcggggcaggttatgatgtacactggtaccagcagtttccagggacagcccccaaactcctcatctatgctaacaccaatcggccctcaggggtccctgaccgagtctctggctccaagtctgacacctcagcctccctggccatcactgggctccaggctgaagatgaggctgattattactgccagtcctatgacagcggcctgagtgatgtggtattcggcggagggaccaagctgaccgtcctag

SEQ ID NO: 8174 - DNA, 334 bp, Homo sapiens
aatcttatgctgactcagccccactctgtgtcggagtctccggggaagacggtaaccatctcctgcaccggcagcagtggcagcattgccagcaactatgtgcagtggtaccagcagcgcccgggcagtgcccccaccactgtgatctatgaggataaccaaagaccctctggggtccctgatcggttctctggctccatcgacagctcctccaactctgcctccctcaccatctctggactgaagactgaggacgaggctgactactactgtcagtcttttgatggcagcaatcattgggtgttcggcggagggaccaagctgaccgtcctag

SEQ ID NO: 8175 - DNA, 325 bp, Homo sapiens; identical to SEQ ID NO: 4861

SEQ ID NO: 8176 - DNA, 337 bp, Homo sapiens
gacatcgtgataacccagtctccagactccctggctgtgtctctgggcgagagggccaccatcaactgcaagtccagccagagtgttttatacaactccaacaataagaactacttagcttggtaccagcagaaaccagggcagcctcctaagctgctcatttactgggcatctacccgggaatccggggtccctgaccgattcagtggcagcgggtctgggacagatttcactctcaccatcagcagcctgcaggctgaagatgtggcagtttattactgtcagcaatattatcctactcccacttttggcctggggaccaagctggagatcaaac

SEQ ID NO: 8177 - DNA, 328 bp, Homo sapiens
tcctatgagctgacacagccaccctcggtgtcagtgtccccaggacaaacggccaggatcacctgctctggagatgcattgccaaaaaagtatgcttattggtaccagcagaagtcaggccaggcccctgtgctggtcatctatgaggacaacaaacgaccctccgggatccctgagagattctctggctccagctcagggacaatggccaccttgactatcagtggggcccaggtggaggatgaaggtgactactactgttactcaacagacagcagtggtaatcacagaggggtcttcggaactgggaccaaggtcaccgtcctag

SEQ ID NO: 8178 - DNA, 340 bp, Homo sapiens
gacatcgtgatgacccagtctccagactccctggctgtgtctctgggcgagagggccaccatcaactgcaagtccagccagagtgttttatacagctccaacaataagaactacttagcttggtaccagcagaaaccaggacagcctcctcagctgctcatttactgggcttctacccgggaatccggggtccctgaccgattcagtggcagcgggtctgggacagatttcactctcaccatcagcagcctgcaggctgaagatgtggcagtttattactgtcagcaatattatagtgctccgtacacttttggccaggggaccaagctggagatcaaac

SEQ ID NO: 8179 - DNA, 331 bp, Homo sapiens
cagtctgtgctgactcagccaccctcagcgtctgggacccccgggcagagggtcaccatctcttgttctggaagcagctccaacatcggaagtaattatgtatactggtaccagcagctcccaggaacggcccccaaactcctcatctataggaataatcagcggccctcaggggtccctgaccgattctctggctccaagtctggcacctcagcctccctggccatcagtgggctccggtccgaggatgaggctgattattactgtgcagcatgggatgacagcctgagtgtcttggtattcggcggagggaccaagctgaccgtcctag

SEQ ID NO: 8180 - DNA, 318 bp, Homo sapiens
gaaattgtgttgacacagtctccagccaccctgtttttgtctccaggggaaagagccaccctctcctgcagggccagtcagagtgttagcagctacttagcctggtaccaacagaaacctggccaggctcccaggctcctcatctatgatgcatccaacagggccactggcatcccagccaggttcagtggcagtgggtctgggacagacttcactctcaccatcagcagcctagagcctgaagattttgcagtttattactgtcagcagcgtagcgactggctgtacacttttggccaggggaccaagctggagatc

SEQ ID NO: 8181 - DNA, 331 bp, Homo sapiens
cagtctgccctgactcagcctgcctccgtgtctgggtctcctggacagtcgatcaccatctcctgcactggaaccagcagtgacgttggtggttataactatgtctcctggtaccaacaacacccaggcaaagcccccaaactcgtgatttatgatgtcagtaatcggccctcaggggtttctaatcgcttctctggctccaagtctggcaacacggcctccctgaccatctctgggctccaggctgaggacgaggctgattattactgcagctcatatacaagcagcagcactctagtattcggcggagggaccaagctgaccgtcctag

SEQ ID NO: 8182 - DNA, 334 bp, Homo sapiens
aattttatgctgactcagccccactctgtgtcggagtctccggggaagacggtaaccatctcctgcaccggcagcagtggcagcattgccagcaactatgtgcagtggtaccagcagcgcccgggcagtgcccccaccactgtgatctatgaggataaccaaagaccctctggggtccctgatcggttctctggctccatcgacagctcctccaactctgcctccctcaccatctctggactgaagactgaggacgaggctgactactactgtcagtcttatgatagcagcacctattgggtgttcggcggagggaccaagctgaccgtcctag

SEQ ID NO: 8183 - DNA, 322 bp, Homo sapiens
gaaattgtgttgacgcagtctccaggcaccctgtctttgtctccaggggaaagagccaccctctcctgcagggccagtcagagtgttagcagcagctacttagcctggtaccagcagaaacctggccaggctcccaggctcctcatctatggtgcatccagcagggccactggcatcccagacaggttcagtggcagtgggtctgggacagacttcactctcaccatcagcagactggagcctgaagattttgcagtgtattactgtcagcagtatggtagctcgtacacttttggccaggggaccaagctggagatcaaac

SEQ ID NO: 8184 - DNA, 331 bp, Homo sapiens
gagattgtgttgacgcagtctccaggcaccctgtctttgtctccaggggaaagagccaccctctcctgcagggccagtcagagtgttaccagcaactacttagcctggtaccagcacaaacctggccaggctcccaggctcctcatctatgctgcctccagcagggccactggcatcccagacaggttcagtggcagtgggtctgggacagacttcactctcaccatcagcagactggagcctgaagattttgcagtgtattactgtcagcagtatagtagttcacctcctacgtacacttttggccaggggaccaagctggagatcaaac

SEQ ID NO: 8185 - DNA, 331 bp, Homo sapiens
aattttatgctgactcagccccactctgtgtcggagtctccggggaagacggtgaccatctcctgcaccggcagcagtggcagcgttgccagcaactatgtgcagtggtaccagcagcgcccgggcagtgcccccaccactgtgatctatgaggataaccaaagaccctctggggtccctgatcggttctctggctccatcgacagctcctccaactctgcctccctcaccatctctggactgaagactgaggacgaggctgactactactgtcagtcttatgataacagcaatgtgctattcggcggagggaccaagctgaccgtcctag

SEQ ID NO: 8186 - DNA, 325 bp, Homo sapiens
gaaattgtgttgacgcagtctccaggcaccctgtctttgtctccaggggaaagagccaccctctcctgcagggccagtcagattattaccagcagctggttagcctggtaccagcagaaacctggccaggctcccaggctcctcatctatggtgcatccagcagggccattggcatcccagacaggttcagtggcagtgggtctgggacagacttcactctcagcatcagcagactggagcctgaagattttgcagtgtattactgtcagcagtatggtagctcaccgtacacttttggccaggggaccaagctggagatcgaac

SEQ ID NO: 8187 - DNA, 325 bp, Homo sapiens; identical to SEQ ID NO: 965

SEQ ID NO: 8188 - DNA, 318 bp, Homo sapiens
tcctatgaactgactcagccaccctcagtgtccgtctccccaggacagacagccagcatcacctgctctggggataatttggggattaaatatacttcctggtatcagcagagggcaggccagtcccctctactggtcatctatcaagatgacaagcggccctcagggatccctgagcgattctctggctccagctctgggaacacagccactctgaccatcagcgggacccaggctgtggatgaggctgactattactgtcaggcgtgggacagcagcactgtgatattcggcggagggaccaagctgaccgtccta

SEQ ID NO: 8189 - DNA, 318 bp, Homo sapiens
tcgtatgagctgactcagccaccctcagtgtccgtgtccccaggacagacagccagcatcacctgctctggagatgaattgggccataagtatccttcttggtatcagcaaagaccaggccaggctcctattctggtcatgtttcaagatggcaagcggccctcagggatccctgagcgattctctggctccaaatctgggaacacagccactctgaccatcagcgggacccaggcgatggatgaggctgacttttactgtcaggcgtgggacaccaacactgtggtattcggcggagggaccaagctgaccgtccta

SEQ ID NO: 8190 - DNA, 325 bp, Homo sapiens
gaaattgtgttgacgcagtctccaggcaccctgtcattgtctccaggggaaagagccaccctctcctgcagggccagtcagagtgttagcagcagcttcttagcctggtaccagcagaaacctggccaggctcccaggctcctcatctatggtgcatccagcaggaccactggcatcccagacaggttcagtggcagtgggtctgggacagacttcactctcaccatcagcagactggagcctgaagattttgcagtgtatcactgtcagcagtatggtagttttccgtacacttttggccaggggaccaagctggagatcaaac

SEQ ID NO: 8191 - DNA, 325 bp, Homo sapiens
gacatccagttgacccagtctccatccttcctgtctgcatctgtaggagacagagtcaccatcacttgccgggccagtcagggcattagcagttatttagcctggtatcagcaaaaaccagggaaagcccctaagctcctgatctatgctgcatccactttgcaaagtggggtcccatcaaggttcagcggcagtggatctgggacagaattcactctcacaatcagcagcctgcagcctgaagattttgcaacttattactgtcaacagcttaatagttaccctcgggggacttttggccaggggaccaagctggagatcaaac

SEQ ID NO: 8192 - DNA, 334 bp, Homo sapiens
cagtctgccctgactcagcctgcctccgtgtctgggtctcctggacagtcgatcaccatctcctgcactggaaccagcagtgatgttgggagttataaccttgtctcctggtaccaacaacacccaggcaaagcccccaaactcatcatttatgagggcagtaagcggccctcaggactttctaatcgcttctctggctccagctctggcaacacggcctccctgacaatctctgggctccaggctgaggacgaggctgattattactgctgctcatatgcaggtagtaccacttttgttgtgttcggaggaggcacccagctgaccgtcctcg

SEQ ID NO: 8193 - DNA, 325 bp, Homo sapiens
gaagttgtgttgacgcagtctccaggcaccctgtctttgtctccaggggaaagagccaccctctcctgcagggccagtcagagtattagcagcagctacttagcctggtaccagcagaaacctggccaggctcccaggctcctcatctatggtgcatccaccagggccactggcatcccagacaggttcagtggcagtgggtctgggacagacttcactctcaccatcagcagactggagcctgaagattttgcagtgtattactgtcagcagtctggtagctcaccgggaacgttcggccaagggaccaaggtggaaatcaaac

SEQ ID NO: 8194 - DNA, 319 bp, Homo sapiens
tcctatgagctgactcagccaccctcagtgtccgtgtccccaggacagacagccagcatcacctgctctggagataaattgggggataaatatacttgctggtatcagcagaagccaggccagtcccctgtgttggtcgtctatcaggatagcaagcggccctcagggatccctgagcgattctctggctccaactctgggaacacagccactctgaccatcagcgggacccaggctatggatgaggctgactattactgtcaggcgtgggacaacagcgcttgggtgttcggcggagggaccaagctgaccgtcctag

SEQ ID NO: 8195 - DNA, 319 bp, Homo sapiens
tcctatgagctgactcagccaccctcagtgtccgtgtccccaggacagacagccagcatcacctgctctggagataaattgggggataagtatgtttgctggtatcagcagaagccaggccagtcccctgtgttggtcatttatcaggataccaagcggccctcagggatccctgagcgattctctggctccaactctgggaacacagccaccctgaccatcagcgggacccagcctatggatgaggctgactattactgtcaggcgtgggacagcaataattatgtcttcggaactgggaccaaggtcaccgtcctag

SEQ ID NO: 8196 - DNA, 322 bp, Homo sapiens
gaaattgtgttgacgcagtctccaggcaccctgtctttgtctccaggggaaagagccaccctctcctgcagggccagtcagagtgttcgcagcaactgcttagtctggtaccagcagaaacctggccaggctcccaggctcctcatctatggtgcatccagcagggccactggcatcccagacaggttcgatggcagtgggtccgggacagacttcactctcaccatcagcagactggagcctgaagattttgcagtgtattactgtcagcagtgtggtggctcacccactttcggcggagggaccaaggtggagatcaaac

SEQ ID NO: 8197 - DNA, 319 bp, Homo sapiens; identical to SEQ ID NO: 5324

SEQ ID NO: 8198 - DNA, 321 bp, Homo sapiens
gacatccagatgacccagtctccttccaccctgtctgtatctgtaggagacagagtcaccatcacttgccgggccagtcagaggattagtagctggttggcctggtatcagcagaaaccagggaaagcccctaacctcctgatctataaggcgtctagtttagaaagtggggtcccatcaaggttcagcggcagtggatctgggacagaattcactcttaccatcagcagcctgcagcctgatgattttgcaacttattactgccaacagtataatacttatccgtggacgttcggccaagggaccaaggtggaaatcaaa

SEQ ID NO: 8199 - DNA, 322 bp, Homo sapiens
tcctatgagctgactcagccaccctcagtgtccgtgtccccaggacagacagccagcatcacctgctctggagataaattgggggataaatatgcttgctggtatcagcagaagccaggccagtcccctgtgctggtcatctatcaagatagcaagcggccctcagggatccctgagcgattctctggctccaactctgggaacacagccactctgaccatcagcgggacccaggctatggatgaggctgactattactgtcaggcgtgggacagcagcactgcatgggtgttcggcggagggaccaagctgaccgtcctag

SEQ ID NO: 8200 - DNA, 337 bp, Homo sapiens
gacatcgtgatgacccagtctccagactccctggctgtgtctctgggcgagagggccaccatcaactgcaagtccagccagagtgttttatacagctccaacaataagaactacttagcttggtaccagcagaaaccaggacagcctcctaagctgctcatttactgggcatctacccgggaatccggggtccctgaccgattcagtggcagcgggtctgggacagatttcactctcaccatcagcagcctgcaggctgaagatgtgtcagtttattactgtcagcaatattatattactccctcttttggccaggggaccaagctggagatcaaac

SEQ ID NO: 8201 - DNA, 310 bp, Homo sapiens
gaaattgtgtttacacagtctccagccaccctgtctttgtctccaggggaaagagccaccctctcctgcagggccagtcagagtgttagcagctacttagcctggtaccaacagaaacctggccaggctcccaggctcctcatctatgatgcatccaacagggccactggcatcccagccaggttcagtggcagtgggtctgggacagacttcactctcaccatcagcagcctagagcctgaagattttgcagtttattactgtcagcagagtacgacgttcggccaagggaccaaggtggaaatcaaac

SEQ ID NO: 8202 - DNA, 322 bp, Homo sapiens
gacatccagttgacccagtctccatccttcctgtctgcatctgtaggagacagagtcaccatcacttgccgggccagtcaggacattagcagttatttagcctggtatcagcaaaaaccagggaaagcccctaaggtcctgatctatgctgcatccgctttgcaaagtggggtcccatcaaggttcagcggcagtggatctgggacagaattcactctcacaatcagcagcctgcagcctgaagattttgcaacttattactgtcaacagcttaatagttaccccttcactttcggccctgggaccacagtggatatcaaac

SEQ ID NO: 8203 - DNA, 331 bp, Homo sapiens
caggctgtggtgactcaggagccctcactgactgtgtccccaggagggacagtcactctcacctgtggctccagcactggagctgtcaccagtggtcattatccctactggttccagcagaagcctggccaagcccccaggacactgatttatgatacaagcaacaaacactcctggacacctgcccggttctcaggctccctccttgggggcaaagctgccctgaccctttcgggtgcgcagcctgaggatgaggctgagtattactgcttgctctcctatagtggtgcccatgtggtcttcggcggagggaccaagctgaccgtcctag

SEQ ID NO: 8204 - DNA, 331 bp, Homo sapiens
cagtctgccctgactcagcctgcctccgtgtctgggtctcctggacagtcgatcaccatctcctgcactggaaccagcagtgatgttgggagttataactttgtctcctggtaccaacagcacccaggcaaagcccccaaactcataatttctgaggtcaataagcggccctcaggggtttctaatcgcttctctggctccaagtctggcaacacggcctccctgacaatctctgggctccaggctgaggacgaggctgattattactgctgctcaaatgctggtagtggcactttgctgttcggcggagggaccaagatgaccgtcctag

SEQ ID NO: 8205 - DNA, 322 bp, Homo sapiens
tcctatgagctgactcagccaccctcagtgtccgtgtccccaggacagacagccagcatcacctgctctggagataaattgggggataaatatgcttgctggtatcagcagaagccaggccagtcccctgtgctggtcatctatcaagatagcaagcggccctcagggatccctgagcgattctctggctccaactctgggaacacagccactctgaccatcagcgggacccaggctatggatgaggctgactattactgtcaggcgtgggacagcagcaccccttttgtcttcggaactgggaccaaggtcaccgtcctag

SEQ ID NO: 8206 - DNA, 325 bp, Homo sapiens; identical to SEQ ID NO: 883

SEQ ID NO: 8207 - DNA, 325 bp, Homo sapiens
gacatccagatgacccagtctccatcctccctgtctgcatctgtaggagacagagtcaccatcacttgccgggcaagtcagagcattgccagatatttaaattggtatcagcagaaagcagggaaagcccctaagctcctgatctatgctgcatccagtttgcaaagtggggtcccatcaaggttcagtggcagtggatccgggacagatttcactctcaccatcagcagtctgcaacctgaagattttgcaacttactactgtcaacagagttacagtacccttctgtacacttttggccaggggaccaagctggagatcaaac

SEQ ID NO: 8208 - DNA, 331 bp, Homo sapiens
cagtctgccctgactcagcctgcctccgtgtctgggtctcctggacagtcgatcaccatctcctgcactggaaccagcagtgatgttgggagttataaccttgtctcctggtaccaacagcacccaggcaaagcccccaaactcatgatttatgaggtcagtaagcggccctcaggggtttctaatcgcttctctggctccaagtctggcaacacggcctccctgacaatctctgggctccaggctgaggacgaggctgattattactgctgctcatatgcaggtagtagcactttggtgttcggcggagggaccaagctgaccgtcctag

SEQ ID NO: 8209 - DNA, 319 bp, Homo sapiens
tcctatgagctgactcagccaccctcagtgtccgtgtccccaggacagacagccagcatcacctgctctggagataaattgggggataaatatgcttgctggtatcagcagaagccaggccagtcccctgtgctggtcatctatcaagatagcaagcggccctcagggatccctgagcgattctctggctccaactctgggaacacagccactctgaccatcagcgggacccaggctatggatgaggctgactattactgtcaggcgtgggacagcagcacgggggtattcggcggagggaccaagctgaccgtcctag

SEQ ID NO: 8210 - DNA, 337 bp, Homo sapiens
cagtctgtgctgacgcagccgccctcagtgtctggggccccagggcagagggtcaccatctcctgcactgggagcagctccaacatcggggcaggttatgatgtacactggtaccagcagcttccaggaacagcccccaaactcctcatctatggtaacaacaatcggccctcaggggtccctgaccgattctctggctccaagtctggcacctcagcctccctggccatcactgggctccaggctgaggatgaggctgattattactgccagtcctatgacagcagcctgagtgccctttatgtcttcggaactgggaccaaggtcaccgtcctag

SEQ ID NO: 8211 - DNA, 334 bp, Homo sapiens
gatgttgtgatgactcagtctccactctccctgcccgtcacccttggacagccggcctccatctcctgcaggtctagtcacagcctcgtatacagtgatggaaacacctacttgaattggtttcagcagaggccaggccaatctccaaggcgcctaatttataaggtttctaaccgggactctggggtcccagacagattcagcggcagtgggtcaggcactgatttcacactgaaaatcagcagggtggaggctgaggatgttggggtttattactgcatgcaaggtacacacgggtacacttttggccaggggaccaagctggagatcaaac

SEQ ID NO: 8212 - DNA, 325 bp, Homo sapiens; identical to SEQ ID NO: 883

SEQ ID NO: 8213 - DNA, 334 bp, Homo sapiens
aattttatgctgactcagccccactctgtgtcggagtctccggggaagacggtaaccatctcctgcaccggcagcagtggcagcattgccagcaactatgtgcagtggtaccagcagcgcccgggcagtgcccccaccactgttatctatgaggataaccaaagaccctctggggtccctgatcggttctctggctccatcgacagctcctccaactctgcctccctcaccatctctggactgaagactgaggacgaggctgactacttctgtcagtcttatgatatcagcaatctttgggtgttcggcggagggaccaagctgaccgtcctag

SEQ ID NO: 8214 - DNA, 328 bp, Homo sapiens
gaaattgtgttgacacagtctccagccaccctgtctttgtctccaggggaaagagccaccctctcctgcagggccagtcagagtgttagcagcttcttagcctggtaccaacagaaacctggccaggctcccaggctcctcatctatgatgcatccaacagggccactggcatcccagccaggttcagtggcagtgggtctgggacagacttcactctcaccatcagcagcctagagcctgaagattttgcagtttattactgtcagcagcgtagcaactggcctcctcggctcactttcggcggagggaccaaggtggagatcaaac

SEQ ID NO: 8215 - DNA, 325 bp, Homo sapiens; identical to SEQ ID NO: 999

SEQ ID NO: 8216 - DNA, 322 bp, Homo sapiens
gacatccagatgacccagtctccatcctccctgtctgcatctgtgggagacagagtcaccatcacttgccgggcaagtcggagcatcagcacctatttaaattggtatcagcagaagccagggaaagcccctaaggtcctgatctatggtgcatccagtttacaaagtggggtcccatcaaggctcagtggcagtggatctgggacagatttcactctcaccatcaccagtctccaacctgaagattttgcaacttactactgtcaacagagttacagtaccccccacacttttggccaggggaccaagctggagatcaaac

SEQ ID NO: 8217 - DNA, 319 bp, Homo sapiens
tcctatgaactgactcagtcaccctcagtgtccgtgtccccaggacagacagccagcatcacctgctcgggagataaattggaagatcagtatatttcctggtatcaacagaagccaggccagtcccctgtgttggtcatgtttcaagatgccaagcggccctcagggatccctgcgcgattttctggttccaactctggaaatacagccaccctgaccatcagcgggacccaggctatggatgaggctgactattactgtcaggcgtgggacagcagcactgtggtgttcggcggagggaccaagctgaccgtcctag

SEQ ID NO: 8218 - DNA, 322 bp, Homo sapiens
gacatacagatgacccagtctccatcctccctgtctgcatctgtaggagacagagtcaccatcacttgccgggcaagtcagagcattagcacctatgtaaattggtatcagcagaaaccagggaaagcccctaagctcctgatatacgctgcattcagtttgcaaagtggggtcccatcaaggttcagtggcagtggatctgggacagatttcactctcaccatcagcagtctgcaacctgaagattttgcaacttacttctgtcagcaaaattacaatacccctcacacttttggccaggggaccaagctggagaccaaac

SEQ ID NO: 8219 - DNA, 325 bp, Homo sapiens
gaaattgtgttgacacagtctccagccaccctgtctttgtctccaggggaaagagccaccctctcctgcagggccagtcagagtgttagcagctacttagcctggtaccaacagaaacctggccaggctcccaggctcctcatctatgatgcatccaacagggccactggcatcccagccaggttcagtggcagtgggtctgggacagacttcactctcaccatcagcagcctagagcctgaagattttgcagtttattactgtcagcagcgtagcaactggcctctgatcaccttcggccaagggacacgactggagattaaac

SEQ ID NO: 8220 - DNA, 322 bp, Homo sapiens; identical to SEQ ID NO: 837

SEQ ID NO: 8221 - DNA, 322 bp, Homo sapiens
gacatccagatgacccagtctccatcctccctgtctgcatctgtaggagacagagtcaccatcacttgccgggcaagtcagagcattagcagctatttaaattggtatcagcagaaaccagggaaagcccctaagctcctgatctatgctgcatccagtttgcaaagtggggtcccatcaaggttcagtggcagtggatctgggacagatttcactctcaccatcagcagtctgcaacctgaagattttgcaacttactactgtcaacagagttacagtaccctcaggacttttggccaggggaccaagctggagatcaaac

SEQ ID NO: 8222 - DNA, 340 bp, Homo sapiens
gacatcgtgatgacccagtctccagactccctggctgtgtctctgggcgagagggccaccatcaactgcaagtccagccagagtgttttatacagctccaacaataagaactacttagcttggtaccagcagagaccaggacagcctcctaagctgctcatttcctgggcatctacccgggaatccggggtccctgaccgattcagtggcagcgggtctgggacagatttcactctcaccatcagcagcctgcaggctgaagatgtggcagtttattactgtcagcaatattatagtaccccgtacacttttggccaggggaccaagctggagatcaaac

SEQ ID NO: 8223 - DNA, 337 bp, Homo sapiens
caggctgtggtgactcaggagccctcactgactgtgtccccaggagggacagtcactctcacctgtggctccagcactggagctgtcaccagtggtcattatccctactggttccagcagaagcctggccaagcccccaggacactgatttatgatacaagcaacaaacactcctggacacctgcccggttctcaggctccctccttgggggcaaagctgccctgaccctttcgggtgcgcagcctgaggatgaggctgagtattactgcttgctctcctatagtggtgctcggtcctattgggtgttcggcggagggaccaagctgaccgtcctag

SEQ ID NO: 8224 - DNA, 332 bp, Homo sapiens
cagtctgtgttgacgcagccgccctcagtgtctgcggccccaggacagaaggtcaccatctcctgctctggaagcagctccaacattgggaataattatgtatcctggtaccagcagctcccaggaacagcccccaaactcctcatttatgacaataataagcgaccctcagggattcctgaccgattctctgtctccaagtctggcacgtcagccaccctgggcatcaccggactccagactggggacgaggccgattattactgcggaacatgggatagcagcctgagtgccttgggtgttcggcggagggaccaagctgaccgtcctag

SEQ ID NO: 8225 - DNA, 325 bp, Homo sapiens
gacatccagatgacccagtctccatcctccctgtctgcatctgtaggagacagagtcaccatcacttgccgggcaagtcagagcattagcagctatttaaattggtatcagcagaaaccagggaaagcccctaagctcctgatctatgctgcatccagtttgcaaagtggggtcccatcaaggttcagtggcagtggatctgggacagatttcactctcaccatcagcagtctgcaacctgaagattttgcaacttactactgtcaacagagttacagtaccctcgagatcaccttcggccaagggacacgactggagattaaac

SEQ ID NO: 8226 - DNA, 321 bp, Homo sapiens
tagtgatgacgcagtctccagccaccctgtctgtgtctccaggggaaagagccaccctctcctgcagggccagtcagagtgttagcaccaacttagcctggtaccagcagaaacctggccaggctcccaggctcctcatctatggtgcattcaatagggccactggtgtcccagccaggttcagtggcagtgggtctgggacagagttcactctcaccatcggcagcctgcagtctgacgattttgcggtttattactgtcagcagtatagttactggcctccgatcaccttcggccaagggacacgactggagattaaac

SEQ ID NO: 8227 - DNA, 350 bp, Homo sapiens
cagcctgtgctgactcagccaccttcctcctccgcatctcctggagaatccgccagactcacctgcaccttgcccagtgacatcaatgttggtagctacaacatatactggtaccagcagaagccagggagccctcccaggtatctcctgtactactactcagactcagataagggccagggctctggagtccccagccgcttctctggatccaaagatgcttcagccaatacagggattttactcatctccgggctccagtctgaggatgaggctgactattactgtatgatttggccaagcaatgcttcttgtggtattcggcggagggaccaagctgaccgtcctag

SEQ ID NO: 8228 - DNA, 322 bp, Homo sapiens
gaaattgtgttgacgcagtctccaggcaccctgtctttgtctccaggggaaagagccaccctctcctgcagggccagtcagagtgttagcagctacttagcctggtaccagcagaaacctggccaggctcccaggctcctcatctatggtgcatccagcagggccactggcatcccagacaggttcagtggcagtgggtctgggacagacttcactctcaccatcagcagactggagcctgaagattttgcagtgtattactgtcagcagtatggtagctcaccgtacacttttggccaggggaccaagctggagatcaaac

SEQ ID NO: 8229 - DNA, 331 bp, Homo sapiens
cagtctgccctgactcagcctgcctccgtgtctgggtctcctggacagtcgatcaccatctcctgcactggaaccagcagtgacattggtggttatagttatgtctcctggtaccaacagcacccaggcaaagtccccaaactcatgatttatgatgtcagtaatcggcccgcaggggtttctaatcgcttctctggctccaagtctggcaacacggcctccctgaccatctctgggctccaggctgaggacgaggctgattattactgcagctcatatacaagaaaaaaaactctggtattcggcggagggaccaagctgaccgtcctag

SEQ ID NO: 8230 - DNA, 331 bp, Homo sapiens
cagtctgccctgactcagcctccctccgcgtccgggtctcctggacagtcagtcaccatctcctgcactggaaccagcagtgacgttggtggttataactatgtctcctggtaccaacaacacccaggcaaagcccccaaactcatgatttatgaggtcagtaagcggccctcaggggtccctgatcgcttctctggctccaagtctggcaacacggcctccctgaccgtctctgggctccaggctgaggatgaggctgattattactgcagctcatatgcaggcagcaacaatttggtattcggcggagggaccaagctgaccgtcctag

SEQ ID NO: 8231 - DNA, 328 bp, Homo sapiens
gaaattgtgttgacacagtctccagccaccctgtctttgtctccaggggaaagagccaccctctcctgcagggccagtcagagtgttagcagctacttagcctggtaccaacagaaacctggccaggctcccaggctcctcatctatgatgcatccaacagggccactggcatcccagccaggttcagtggcagtgggtctgggacagacttcactctcaccatcagcagcctagagcctgaagattttgcagtttattactgtcagcagcgtagcaactggcctccgaggatcaccttcggccaagggacacgactggagattaaac

SEQ ID NO: 8232 - DNA, 334 bp, Homo sapiens
cagtctgccctgactcagcctcgctcagtgtccgggtctcctggacagtcagtcaccatctcctgcactggaaccagcagtgatgttggtggttatgactctgtctcctggtaccaacatcacccaggcaaagcccccaaactcatgatttatgatgtcagtaagcggccctcaggggtccctgatcgcttctctggctccaagtctggcaacacggcctccctgaccatctctgggctccaggctgaggatgaggctgattattactgctgctcatatgcaggcagctacactttcgtggttttcggcggagggaccaagctgaccgtcctag

SEQ ID NO: 8233 - DNA, 318 bp, Homo sapiens
ttgtgttgacacagtctccagccaccctgtctttgtctccaggggagagagccaccctctcctgcagagccagtcagactattagcaggaacttagcctggtaccaacagaaacctggccaggctcccaggcccctcatctatgatgcatccaatagggccgctggcatcccagccaggttcagtggcagtgggtctgggacagacttcactttcaccatcagcggcctagagcctgaagattctgcagtttattactgtcagcagcgtaacaactggccctacaccttcggccaagggacacgactggagattaaac

SEQ ID NO: 8234 - DNA, 322 bp, Homo sapiens
gccatccggatgacccagtctccatcctcattctctgcatctacaggagacagagtcaccatcacttgtcgggcgagtcagggtattagcagttatttagcctggtatcagcaaaaaccagggaaagcccctaagctcctgatctatgctgcatccactttgcaaagtggggtcccatcaaggttcagcggcagtggatctgggacagatttcactctcaccatcagctgcctgcagtctgaagattttgcaacttattactgtcaacagtattatagttaccctcgaactttcggcggagggaccaaggtggagatcaaac

SEQ ID NO: 8235 - DNA, 334 bp, Homo sapiens
aattttatgctgactcagccccactctgtgtcggagtctccggggaagacggtaaccatctcctgcaccggcagcagtggcagcattgccagcaactatgtgcagtggtaccagcagcgcccgggcagtgcccccaccactgtgatctatgaggataaccaaagaccctctggggtccctgatcggttctctggctccatcgacagctcctccaactctgcctccctcaccatctctggactgaagactgaggacgaggctgactactactgtcagtcttatgatagcaacaatcagggggtattcggcggagggaccaagctgaccgtcctag

SEQ ID NO: 8236 - DNA, 328 bp, Homo sapiens
gacatccagatgacccagtctccatcctccctgtctgcatctgtaggagacagagtcaccatcacttgccgggcaagtcagagcattagcagctatttaaattggtatcagcagaaaccagggaaagcccctaagctcctgatctatgctgcatccagtttgcaaagtggggtcccatcaaggttcagtggcagtggatctgggacagatttcactctcaccatcagcagtctgcaacctgaagattttgcaacttactactgtcaacagagttacagtacccaggccatgtacacttttggccaggggaccaagctggagatcaaac

SEQ ID NO: 8237 - DNA, 322 bp, Homo sapiens
gacatccagatgacccagtctccatcctccctgtctgcatctgtaggagacagagtcaccatcacttgccgggcaagtcagggcattacaaatgatttaggctggtatcagcagaaaccagggaaagcccctaagcgcctgatctatgctgcatccagtttgcaaagtggggtcccatcaaggttcagcggcagtggatctgggacagaattcactctcacaatcagcagcctgcagcctgaagattttgcaacttattactgtctacagcataatagttaccctctcactttcggcggagggaccaaggtggagatcaaac

SEQ ID NO: 8238 - DNA, 334 bp, Homo sapiens
cagtctgccctgactcagcctgcctccgtgtctgggtctcctggacagtcgatcaccatctcctgcactggaaccagcagtgacgttggtggttataactatgtctcctggtaccaacagcacccaggcaaagcccccaaactcatgatttatgatgtcagtaatcggccctcaggaatttctaatcgcttctctggctccaagtctggcaacacggcctccctgaccatctctgggctccaggctgaggacgaggctgattatttctgcagctcatatacaagcagcagcactctcgtggtattcggcggagggaccaagctgaccgtcctag

SEQ ID NO: 8239 - DNA, 331 bp, Homo sapiens
cagactgtggtgacccaggagccatcgttctcagtgtcccctggagggacagtcacactcacttgtggcttgagctctggctcagtctctactagttactaccccaactggtaccagcaggccccaggccaggctccacgcacgctcatctacaacacaaacactcgctcttctggggtccctgatcgcttctctggctccatccttgggaacaaggctgccctcaccatcacgggggcccaggcagatgatgaatctgattattactgtctgctgtatatgggtagtggcatttgggtgttcggcggagggaccaagctgaccgtcctag

SEQ ID NO: 8240 - DNA, 331 bp, Homo sapiens
cagtctgccctgactcagcctccctccgcgtccgggtctcctggacagtcagtcaccatctcctgcactggatccagcagtgacgttggtggttatgactatgtctcctggtaccaacaacacccaggcaaagcccccaaactcatgatttatgaggtcagtaagcggccctcaaaggtccctgatcgcttctttggctccaagtctgacaacacggcctccctgaccgtctctgggctccaggctgaggatgaggctgattattactgcagctcatatgcaggcgacaacatttgggtgttcggcggagggaccaagctgaccgtcctag

SEQ ID NO: 8241 - DNA, 328 bp, Homo sapiens
cagtctgccctgactcagcctcgctcagtgtccgggtctcctggacagtcagtcaccatctcctgcactggaaccagcagtgatgttggtggttataactatgtctcctggtaccaacagcacccaggcaaagcccccaaactcatgatttatgatgtcagtaagcggccctcaggggtccctgatcgcttctctggctccaagtctggcaacacggcctccctgaccatctctgggctccaggctgaggatgaggctgattattactgctgctcatctgcaggcagctactccgtattcggcggagggaccaagctgaccgtcctag

SEQ ID NO: 8242 - DNA, 328 bp, Homo sapiens
cagtctgccctgactcagcctcgctcagtgtccgggtctcctggacagtcagtcaccatctcctgcactggagccagcagtgatgttggtggttataactatgtctcctggtaccaacagcacccaggcaaagcccccaaactcatgatttatgatgtcagtaagcggccctcaggggtccctgatcgcttctctggctccaagtctggcaacacggcctccctgaccatctctgggctccagactgaggatgaggctgattattactgctgctcatatgcaggcagctactccgtattcggcggagggaccaagctgaccgtcctag

SEQ ID NO: 8243 - DNA, 340 bp, Homo sapiens
gacatcgtgatgacccagtctccagactccctggctgtgtctctgggcgagagggccaccatcaactgcaagtccagccagagtgttttatacagttccaacaataacaactacttagcttggtaccagcagaaaccaggacagcctcctaagttgctcatttactgggcatctacccgggaatccggggtccctgaccgattcagtggcagcgggtctgggacagatttcactctcaccatcagcagcctgcaggctgaagatgtggcagtttatttctgtcagcaatattataatactcctcggacgttcggccaagggaccaaggtggaaatcaaac

SEQ ID NO: 8244 - DNA, 328 bp, Homo sapiens
cagtctgccctgactcagcctgcctccgtgtctgggtctcctggacagtcgatcaccatctcctgcactggaaccagcagtgatgttgggagttataaccttgtctcctggtaccaacagcacccaggcaaagcccccaaactcatgatttatgaggtcagtgagcggccctcaggggtttctaatcgcttctctggctccaagtctggcaacacggcctccctgacaatctctgggctccaggctgaggacgaggctgattattactgctgctcatatgtaggtaccctttatgtcttcggaactgggaccaaggtcaccgtcctag

SEQ ID NO: 8245 - DNA, 331 bp, Homo sapiens
cagtctgccctgactcagcctgcctccgtgtctgggtctcctggacagtcgatcaccatctcctgcactggaaccagcagtgacgttggtggttataactatgtctcctggtaccaacaacacccaggcaaagcccccaaactcatgatttatgatgtcagtaatcggccctcaggggtttctaatcgcttctctggctccaagtctggcaacacggcctccctgaccatctctgggctccaggctgaggacgaggctgattattactgcagctcatatacaagcagcagcaccgtggtattcggcggagggaccaagctgaccgtcctag

SEQ ID NO: 8246 - DNA, 325 bp, Homo sapiens
gaaatagtgatgacgcagtctccagccaccctgtctgtgtctccaggggaaagagccaccctctcctgcagggccagtcagagtgttagcagcaacttagcctggtaccagcagaaacctggccaggctcccaggctcctcatctatggtgcatccaccagggccactggtatcccagccaggttcagtggcagtgggtctgggacagagttcactctcaccatcagcagcctgcagtctgaagattttgcagtttattactgtcagcagtataataactggccgaggtggacgttcggccaagggaccaaggtggaaatcaaac

SEQ ID NO: 8247 - DNA, 325 bp, Homo sapiens
gaaattgtgttgacgcagtctccaggcaccctgtctttgtctccaggggaaagagccaccctctcctgcagggccagtcagagtgttagcagcagctacttagcctggtaccagcagaaacctggtcaggctcccaggctcctcatctatggtgcatccagcagggccactggcatcccagacaggttcagtggcagtgggtctgggacagacttcactctcaccatcagcagactggagcctgaagattttgcagtgtattactgtcagcagtatgatagctcacctcggacgttcggccaagggaccaaggtggaaatcaaac

SEQ ID NO: 8248 - DNA, 323 bp, Homo sapiens
cagtctgccctgactcagcctcgctcagtgtccgggtctcctggacagtcagtcaccatctcctgcactggaaccagcagtgatgttggtggttataactatgtctcctggtaccaacagcacccagacaaagcccccaaactcatgatttatgatgtcagtaagcggccctcaggggtccctgatcgcttctctggctccaagtctggcaacacggcctccctgaccatctctgggctccaggctgaggatgaggctgattattactgctgctcatatgcaggcagttgggtgttcggcggagggaccaagctgaccgtcct

SEQ ID NO: 8249 - DNA, 325 bp, Homo sapiens
tcctatgtgctgactcagccaccctcagtgtcagtggccccaggaaagacggccaggattacctgtgggggaagcaacattggaactaaaagtgtacactggtaccagcagaagccaggccaggcccctgtgctggtcatctattatgatagcgaccggccctcagggatccctgagcgattctctggctccaactctgggaacacggccaccctgaccatcagcagggtcgaagccggggatgaggccgactattactgtcaggtgtgggatagtagtagtgatcataaggtattcggcggagggaccaagctgaccgtcctag

SEQ ID NO: 8250 - DNA, 322 bp, Homo sapiens
gacatccagatgacccagtctccatcctccctgtctgcatctgtaggagacagagtcaccatcacttgtcggacaagtcagagcattagcagctatttaaattggtatcagcagaaaccagggaaagcccctaaactcctgatctatgttgcatccagtttgcaaagtggggtcccatcaaggttcagtggcagtggatctgggacagaattcactctcaccatcagcagtctgcaacctgaagattctgcaacttactactgtcaacagagttacagtaccccgtacgcttttggccaggggaccaagctggagatcaaac

SEQ ID NO: 8251 - DNA, 328 bp, Homo sapiens
tcttctgagctgactcaggaccctgctgtgtctgtggccttgggacagacagtcaggatcacatgccaaggagacagcctcagaagctattatgcaagctggtaccagcagaagccaggacaggcccctgtacttgtcatctatggtaaaaacaagcggccctcagggattccagaccgattctctggctccagctcaggaaacacagcttccttgaccatcactggggctcaggcggaagatgaggctgactattactgtaactcccgggacaacagtggtaaccatctggaagtcttcggaactgggaccaaggtcaccgtcgtag

SEQ ID NO: 8252 - DNA, 322 bp, Homo sapiens
gaaattgtgttgacacagtctccagccaccctgtctttgtctccaggggaaagagccaccctctcctgcagggccagtcagagtgttagcagcttcttagcctggtaccaacagaaacctggccaggctcccaggctcctcatctatgatgcatccaacagggccactggcatcccagccaggttcagtggcagtgggtctgggacagacttcactctcaccatcagcagcctagagcctgaagattttgcagtttattactgtcagcagcgtaacaactggtcgatcaccttcggccaagggacacgactggagattaaac

SEQ ID NO: 8253 - DNA, 319 bp, Homo sapiens
gacatccagatgacccagtctccatcctccctgtctgcatctgtaggagacagagtcaccatcacttgccgggcaagtcagagcattagcagctatttaaattggtatcagcagaaaccagggaaagcccctaagctcctgatctatgctgcatccagtttgcaaagtggggtcccatcaaggttcagtggcagtggatctgggacagatttcactctcaccatcagcagtctgcaacctgaagattttgcaacttactactgtcaacagagttacagtaccccattcactttcggccctgggaccaaagtggatatca

SEQ ID NO: 8254 - DNA, 325 bp, Homo sapiens
gacatccagatgacccagtctccatcctccctgtctgcatctgtaggagacagagtcaccatcacttgccgggcaagtcagagcattagtaggtatttaaattggtatcagcagaaaccagggaaagcccctaagctcctgatctatgctgtatccagtttgcaaagtggggtcccatcaaggttcagtggcagtggatctgggacagatttcactctcaccatcagcagtctgcaacctgaagattttgcaacttactactgtcaacagagttacagtatccctccgtggacgttcggccaagggaccaaggtggaaatcaaac

SEQ ID NO: 8255 - DNA, 325 bp, Homo sapiens
gacatccagatgacccagtctccatcttccgtgtctgcatctgtaggagacagagtcaccatcgcctgtcgggcgagtcaggatattaacacctggttagcctggtatcagcacaaaccagggagagcccctaagctcctgatctatggtgcatacactttgcaaagtggggtcccatcaaggttcagcggcagtggatctgggacatttttcactctcaccatcagcggcctgcagcccgaagattttgcaacttactattgtcaacaggctcacagtttccccccgctcactttcggcggagggaccaaagtcgagatcaaac

SEQ ID NO: 8256 - DNA, 328 bp, Homo sapiens
gaaattgtgttgacacagtctccagccaccctgtctttgtctccaggggaaagagccgccctctcctgcagggccagtcagagtgttagcaacttcttagcctggtaccaacagaaacctggccaggctcccaggctcctcatctatgatgcatccaacagggccactggcatcccagccaggttcagtggcagtgggtctgggacagacttcactctcaccatcagcagcctagagcctgaagattttgcagtttattactgtcagcagcgtagcaactggcctccgaggctcactttcggcggagggaccaaggtggagatcaaac

SEQ ID NO: 8257 - DNA, 337 bp, Homo sapiens
gatattgtgatgactcagtctccactctccctgcccgtcacccctggagagccggcctccatctcctgcaggtctagtcagagcctcctgtatagtaatggatacaactatttggattggtacctgcagaagccagggcagtctccacagctcctgatctatttgggttctaatcgggcctccggggtccctgacaggttcagtggcagtggatcaggcacagattttacactgaaaatcagcagagtggaggctgaggatgttggggtttattactgcatgcaagctctacaaactccgttcactttcggccctgggaccaaagtagatatcaaac

SEQ ID NO: 8258 - DNA, 322 bp, Homo sapiens
gacatccagatgacccagtctccatcctccctgtctgcatctgtaggagacagagtcaccatcacttgccaggcgagtcaggacattagcaactatttaaattggtatcagcagaaaccagggaaagcccctaagctcctgatctacgatgcatccaatttggaaacaggggtcccatcaaggttcagtggaagtggatctgggacagattttactttcaccatcagcagcctgcagcctgaagatattgcaacatattactgtcaacagtatgataatctccttatcactttcggcggagggaccaaggtggagatcaaac

SEQ ID NO: 8259 - DNA, 340 bp, Homo sapiens
gacatcgtgatgacccagtctccagactccctggctgtgtctctgggcgagagggccaccatcaactgcaagtccagccagagtgttttatacagctccagcaataagaactacttagcttggtaccagcagaaaccaggacagcctcctaagctgctcatttactgggcatctacccgggaatccggggtccctgaccgattcagtggcagcgggtctgggacagatttcactctcaccatcagcagcctgcaggctgaagatgtggcagtttattactgtcagcaatattatagtactccgtggacgttcggccaagggaccaaggtggaaatcaaac

SEQ ID NO: 8260 - DNA, 325 bp, Homo sapiens
gaaattgtgttgacgcagtctccaggcaccctgtctttgtctccaggggaaagagccaccctctcctgcagggccagtcagagtgttagcagcagctacttagcctggtaccagcagaaacctggccaggctcccaggctcctcatctatggtgcatccagcagggccactggcatcccagacaggttcagtggcagtgggtctgggacagacttcactctcaccatcagcagactggagcctgaagattttgcagtgtattactgtcagcagtttggtaggtcagtgtggacgttcggccaagggaccaaggtggaaatcaaac

SEQ ID NO: 8261 - DNA, 322 bp, Homo sapiens
gacatccagatgacccagtctccatcctccctgtctgcatctgtaggagacagagtcaccatcacttgccgggcaagtcagggcataagaaatgatttaggctggtatcagcagaaaccagggaaagcccctaagcgcctgatctatgctgcatccagtttgcaaagtggggtcccatcaaggttcagcggcagtggatctgggacagaattcactctcacaatcagcagcctgcagcctgaagattttgcaacttattactgtctacagcataatagttacccgctcactttcggcggagggaccaaggtggagatcaaac

SEQ ID NO: 8262 - DNA, 325 bp, Homo sapiens
gaaattgtgttgacgcagtctccaggcaccctgtctttgtctccaggggaaagagccaccctctcctgcagggccagtcagagtgttagcagcagctccttagcctggtaccagcagaaacctggccaggctcccaggctcctcatctatggtgcgtccagcagggccactggcatcccagacaggttcagtggcagtgggtctgggacagacttcactctcaccatcagcagactggagcctggagattttgcagtgtattcctgtcagcagtttggtagctcacctctcactttcggcggagggaccaaggtggagatcaaac

SEQ ID NO: 8263 - DNA, 337 bp, Homo sapiens
caggctgtggtgactcaggagccctcactgactgtgtccccaggagggacagtcactctcacctgtggctccagcactggagctgtcaccggtggtcattatccctactggttccagcagaagcctggccaagcccccaggacactgatttatgatacatacaacaaacactcctggacacctgcccggttctcaggctccctccttgggggcaaagctgccctgaccctttcgggtgcgctgcctgaggatgaggctgagtattactgtttgctctcctatagtggtgctcgggtccctgtggtcttcggcggagggaccagcctgaccgtcctag

SEQ ID NO: 8264 - DNA, 331 bp, Homo sapiens
cagtctgccctgactcagcctccctccgcgtccgggtctcctggacagtcagtcaccatctcctgcactggaaccagcagtgacgttggtggttataactatgtctcctggtaccaacagcacccaggcaaagcccccaaactcatgatttatgacgtcagtaagcggccctcaggggtccctgatcgcttctctggctccaagtctggcaacacggcctccctgaccgtctctgggctccaggctgaggatgaggctgattattactgcagctcatatgcaggcagcaacaattgggtgttcggcggagggaccaaactggccgtcctag

SEQ ID NO: 8265 - DNA, 322 bp, Homo sapiens
gacatccagatgacccagtctccatcctccctgtctgcatctgtaggagacagagtcaccatcacttgccaggcgagtcaggacattagcaactatttaaattggtatcagcagagaccagggaaagcccctaagctcctgatctacgatgcatccaatttggaaacaggggtcccatcaaggttcagtggaagtggatctgggacagattttactttcaccatcagcagcctgcagcctggagatattgcaacatattactgtcaacagtatgataatctccccctcactttcggcggagggaccaaggtggagatcaaac

SEQ ID NO: 8266 - DNA, 324 bp, Homo sapiens
tcctatgagctgacacagccaccctcggtgtcagtgtccccaggacaaacggccaggatcacctgctctggagatgcattgccaaaaaaatatgcttattggtaccagcagaagtcaggccaggcccctgtgctggtcatctatgaggacaacaaacgaccctccgggatccctgagagattctctggctccagctcagggacaatggccaccttgactatcagtggggcccaggtggaggatgaagctgactactactgttactcaagagacagcagtggtaatcattgggtgttcggcggagggaccaagctgaccgtccta

SEQ ID NO: 8267 - DNA, 319 bp, Homo sapiens
tcctatgagctgacacagccatcctcagtgtcagtgtctccgggacagacagccaggatcacctgctcaggagatgtactggcaaaaaaatatgctcggtggttccagcagaagccaggccaggcccctgtgttggtgatttataaagacagtgagcggcccttagggatccctgagcgattctccggctccagctcagggaccacagtcaccttgaccatcaacggggcccaggttgaggatgaggctgactattactgttactctgcgcctgacaatgtgggagtgttcggcggagggactaagctgaccgtcctag

SEQ ID NO: 8268 - DNA, 331 bp, Homo sapiens
cagtctgccctgactcagcctgcctccgtgtctgggtctcctggacagtcgatcaccatctcctgcactggaaccagtagtgattttgggagttataagtttgtctcctggtaccaacgacacccaggcaaagcccccaaactcatgatttatgagggcactaagcggccctcaggggtttctaatcgcttctctggctccaagtctggcaacacggcctccctgacaatctctggtctccaggctgaggacgaggctgattattactgctgctcatatgcaggtagtacccctgtgatattcggcggagggaccaagctgaccgtcctag

SEQ ID NO: 8269 - DNA, 340 bp, Homo sapiens
gatgttgtgatgactcagtctccactctccctgcccgtcacccttggacagccggcctccatctcctgcaggtctagtcaaagcctcgtacacagtgatggaaacacctacttgaattggtttcagcagaggccaggccaatctccaaggcgcctaatttataaggtttctaaccgggactctggggtcccagacagattcagcggcagtgggtcaggcactgatttcacactgaaaatcagcagggtggaggctgaggatgttggcgtttattactgcatgcaaggtacacactggcctcctctcactttcggcggagggaccaaggtggagatcaaac

SEQ ID NO: 8270 - DNA, 321 bp, Homo sapiens
tcctatgagctgacacagccaccctcggtgtcagtgtccccaggacagacggccaggatcacctgctctggagatgcattgtcaaagcactatgtttattggtaccagcagaagccaggccaggcccctgttctggtgatatataaagacagtgagaggccctcagggatccctgagcgattctctggctccagttcagggacaacagtcacgttgaccatcagtggagtccaggcaggagacgaggctgactattattgtcaatcagcagacagcagtgccacttgggtgttcggcggagggaccaagctgaccgtccta

SEQ ID NO: 8271 - DNA, 331 bp, Homo sapiens
cagtctgtgctgactcagccaccctcagcgtctgggacccccgggcagagggtcaccatctcttgttctggaagcagctccaacatcggaagtaatactgtaaactggtaccagcagctcccaggaacggcccccaaactcctcatctatagtaataatcagcggccctcaggggtccctgaccgattctctggctccaagtctggcacctcagcctccctggccatcagtgggctccagtctgaggatgaggctgattattactgtgcagcatgggatgacagcctgaatgtcgtggtattcggcggagggaccaagctgaccgtcctag

SEQ ID NO: 8272 - DNA, 316 bp, Homo sapiens
gacatccagatgacccagtctccatcctccctgtctgcatctgtaggagacagagtcaccatcacttgccgggcgagtcagggcattagcaattatttagcctggtatcaccagaaaccagggaaagttcctaaactcctgatctatgctgcatccactttgcaatcaggggtcccatctcggttcagtggcagtggatctgggacagatttcactctcaccatcagcagcctgcagcctgaagatgttgcaacttattactgtcaaaagtataacagtgtcctcttcggccaagggacacgactggagattaaac

SEQ ID NO: 8273 - DNA, 322 bp, Homo sapiens
gacatccagttgacccagtctccatccttcctgtctgcatctgtaggagacagagtcaccatcacttgccgggccagtcagggcattagcagtgacttagcctggtatcagcaaaaaccagggaaagcccctaagctcctgatctatgctgcatccactttgcagagtggggtcccatcaaggttcagcggcagtggatctgggacagaattcactctcacaatcagcagcctgcagcctgaagattttgcaacctattactgtcaccagcttaatagttaccctctcactttcggcggagggaccaaggtggagatcaaac

SEQ ID NO: 8274 - DNA, 343 bp, Homo sapiens
gatattgtgatgactcagtctccactctccctgcccgtcacccctggagagccggcctccatctcctgcaggtctagtcagagcctcctgcatagtaatggatacaactatttggattggtacctgcagaagccagggcagtctccacagctcctgatctatttgggttctaatcgggcctccggggtccctgacaggttcagtggcagtggatcaggcacagattttacactgaaaatcagcagagtggaggctgaggatgttggggtttattactgcatgcaagctctacaaactcctccgaagtacacttttggccaggggaccaagctggagatcaaac

SEQ ID NO: 8275 - DNA, 322 bp, Homo sapiens
tcctatgtgctgactcagccaccctcagtgtcagtggccccaggaaagccggccaggattacctgtgggggaaacaacattggaagtaaaagtgtgcactggtaccagcagaagccaggccaggcccctgtgttggtcatctattatgatagcgaccggccctcagggatccctgagcgattctctggctccaactctgggaacacggccaccctgaccatcagcagggtcgaagccggggatgaggccgactattactgtcaggtgtgggatagtagttgtgatcgggtgttcggcggagggaccaagctgaccgtcctag

SEQ ID NO: 8276 - DNA, 340 bp, Homo sapiens
gatattgtgatgacccagactccactctccctgcccgtcacccctggagagccggccttcatctcctgcaggtctagtcagagcctcttggatagtgatgatggaaacacctatttggactggtacctgcagaagccagggcagtctccacaactcctgatctataagatttcctatcgggcctctggagtcccaaacaggttcagtggcagtgggtcaggcactgatttcacactgaaaatcagcagggtggaggctgaggatgttggagtctattactgcatgcaacgtacagagtttccttgtacttttggccaggggaccaagctggagatcaaac

SEQ ID NO: 8277 - DNA, 325 bp, Homo sapiens
tcctatgtgctgactcagccaccctcagtgtcagtggccccaggaaagacggccaggattacctgtgggggaagcaacattggcagtaaaagtgtgcgctggtaccagcacaagccaggccaggcccctgtgttggtcatctattatgatagcgaccggccctcagggatccctgagcgattctctggctccaactctgggaacacggccaccctgaccatcagcagggtcgaagccggggatgaggccgactattactgtcaggtgtgggatagtactagtgatcattttgtcttcggaactgggaccaaggtcaccgtcctag

SEQ ID NO: 8278 - DNA, 322 bp, Homo sapiens
gacatccagatgacccagtctccatcctccctgtctgcatctgtaggagacagagtcaccatcacttgccaggcgagtcaggacattagcaattatttaaattggtatcagcagaaaccagagaaagccccgaagctcctgatctacgatgcatccaatttggaaacaggggtcccatcaaggttcagtggaagtggatctgggacagattttactttcaccatcagcagcctgcagcctgaagatattgcaacatattactgtcatcaatatgataatctccctctcactttcggcggtgggaccaaggtggagatcaaac

SEQ ID NO: 8279 - DNA, 322 bp, Homo sapiens; identical to SEQ ID NO: 5205

SEQ ID NO: 8280 - DNA, 337 bp, Homo sapiens
gatattgtgatgactcagtctccactctccctgcccgtcacccctggagagccggcctccatctcctgcaggtctagtcagagcctcctgcatagtaatggatacaactatttggattggtacctgcagaagccagggcagtctccacagctcctgatctatttgggttctaatcgggcctccggggtccctgacaggttcagtggcagtggatcaggcacagattttacactgaaaatcagcagagtggaggctgaggatgttggggtttattactgcatgcaagctctacaaactttgtacacttttggccaggggaccaagctggagatcaaac

SEQ ID NO: 8281 - DNA, 333 bp, Homo sapiens
cagtctgccctgactcagcctgcctccgtgtctgggtctcctggacagtcgatcaccatctcctgcactggaaccagcagtgacattggtggttataactatgtctcctggtaccaacaacacccaggcaaagcccccaaactcgtcatttatgatgtcagtaatcggccctcaggggtttctaatcgcttctctggctccaagtctggcaacacggcctccctgaccatctctgggctccaggctgaggacgaggctgagtattactgctcctcatatacaaccaccagcactctcgtggtgctcggcggcgggaccaagctgaccgtccta

SEQ ID NO: 8282 - DNA, 333 bp, Homo sapiens
caggctgccctgactcagcctgcctccgtgtctgggtctcctggacagtcgatcaccatctcctgcactggaaccagcggtgacgttggtggttataactatgtctcctggtaccagcaacacccaggcaaaggccccaaactcatgatttatgatgtcactaatcggccctcaggggtttctgatcgcttctctggctccaagtctggcaacacggcctccctgaccatctctgggctccaggctgaggacgaggctgattattactgcacctcatatacaagcagcagcactctcgtggtgttcggcggagggaccaaactgaccgtccta

SEQ ID NO: 8283 - DNA, 325 bp, Homo sapiens
gaaattgtgttgacgcagtctccaggcaccctgtctttgtctccaggggaaagagccaccctctcctgcagggccagtcagagtgttagaagcagctacttagcctggtaccagcagaaacctggccaggctcccaggctcctcatctatggtgcatccagcagggccactggcatcccagacaggttcagtggcagtgggtctgggacagacttcactctcaccatcagcagactggagcctgaagattttgcagtgtattactgtcagcagtatggtagctcaccgtggacgttcggccaagggaccaaggtggaaatcaaac

SEQ ID NO: 8284 - DNA, 328 bp, Homo sapiens
gaaattgtgttgacacagtctccagccaccctgtctttgtctccaggggaaagagccaccctctcctgcagggccagtcagagtgttagcagctacttagcctggtaccaacagaaacctggccaggctcccaggctcctcatctatgatgcatccaacagggccactggcatcccagccaggttcagtggcagtgggtctgggacagacttcactctcaccatcagcagcctagagcctgaagattttgcagtttattactgtcagcagcgtagcaactggcctccggcgctcactttcggcggagggaccaaggtggagatcaaac

SEQ ID NO: 8285 - DNA, 331 bp, Homo sapiens
cagtctgccctgactcagcctgcctccgtgtctgggtctcctggacagtcgatcaccatctcctgcactggaaccagcagtgatgttgggagttataaccttgtctcctggtaccaacagcacccaggcaaagcccccaaactcatgatttatgagggcagtaagcggccctcaggggtttctaatcgcttctctggctccaagtctggcaacacggcctccctgacaatctctgggctccaggctgaggacgaggctgattattactgctgctcatatgcaggtagttacactgtgatattcggcggagggaccaagctgaccgtcctag

SEQ ID NO: 8286 - DNA, 322 bp, Homo sapiens
gacatccagatgacccagtctccttccaccctgtctgcatctgtcggagacagagtcaccatcacttgccgggccagtcagagtattagtaactggttggcctggtatcagcagaaaccagggaaagcccctaagctcctgatctataaggcgtctagtttagaaagtggggtcccatcaaggttcagcggcagtggatctgggacagagttcactctcaccatcagcagcctgcagcctgatgatttggcaacttattactgccaacagtataatagttataagtggacgttcggccaagggaccaaggtggaaatcaaac

SEQ ID NO: 8287 - DNA, 325 bp, Homo sapiens
gaaatagtgatgacgcagtctccagccaccttgtctgtgtctccaggggaaagagccaccctctcctgcagggccagtcagagtgttagcagcaagttagcctggtaccaggagaaacctggccaggctcccaggctcctcatctatggtgcatccaccagggccactggtatcccagccaggttcagtggcagtgggtctgggacagagttcactctcaccattagcagcctgcagtctgaagattctgcagtttattactgccagcagtataataactggcctccgttgacgttcggccaagggaccaaggtggaaatcaaac

SEQ ID NO: 8288 - DNA, 322 bp, Homo sapiens
gacatccagatgacccagtctccatcctccctgtctgcatctgtaggagacagagtcaccatcacttgccaggcgagtcaggacattagcaactatttaaattggtatcagcagaaaccagggaaagcccctaagctcctgatcaacgatgcatccaatttggaaacaggggtcccatcaaggttcagtggaagtggatctgggacagattttactttcaccatcagcagcctgcagcctgaagatattgcaacatattactgtcaacagtctgagaatctcctattcactttcggccctgggaccaaagtggatatcaaac

SEQ ID NO: 8289 - DNA, 337 bp, Homo sapiens
gatactgtgatgacccagactccactctcctcacctgtcacccttggacagccggcctccatctcctgcaggtctagtcaaagcctcgtacacagtgatggaaacacctacttgagttggcttcagcagaggccaggccagcctccaagactcctaatttataagatttctaaccggttctctggggtcccagacagattcagtggcagtggggcagggacagatttcacactgaaaatcagcagggtggaagctgaggatgtcggggtttattactgcatgcaagttacacaatttccgtacacttttggccaggggaccaagctggagatcaaac

SEQ ID NO: 8290 - DNA, 325 bp, Homo sapiens
cagtctgccctgactcagcctcgctcagtgtccgggtctcctggacagtcagtcaccatctcctgcactggaaccagcagtgatgttggtggttataactatgtctcctggtaccaacaacacccaggcaaagcccccaaactcatgatttatgatgtcactaagcggccctcaggggtccctgatcgcttctctggctccaagtctggcaacacggcctccctgaccatctctgggctccaggctgaggatgaggctgattattactgctgctcatatgcaggcaactatattttcggcggagggaccaagctgaccgtcctag

SEQ ID NO: 8291 - DNA, 328 bp, Homo sapiens
gaaattgtgttgacgcagtctccaggcaccctgtctttgtctccaggggaaagagccaccctctcctgcagggccagtcagagtgtcccccacaactacttagcctggtaccagcagaaacctggccaggctcccaggctcctcatctatggtgcctccagcagggccactggcatcccagacaggttcagtggcagtgggtctgggacagacttcactctcaccatcagcagactggagcctgaagattttgcagtgtattactgtcagcagtatggtagctcacttcaattcactttcggccctgggaccaaagtggatatcaaac

SEQ ID NO: 8292 - DNA, 322 bp, Homo sapiens
gacatccagatgacccagtctccttccaccctgtctgcatctgtaggagacagagtcaccatcacttgccgggccagtcagagtattagtagctggttggcctggtatcagcagaaaccagggaaagcccctgagctcctgatctataaggcgtctagtttagaaggtggggtcccatcaaggttcagcggcagtggatctgggacagaattcactctcaccatcagcagcctgcagcctgatgattttgcaacttattactgccaacactataaaacttattcgtggacgttcggccaagggaccaaggtggaaatcaaac

SEQ ID NO: 8293 - DNA, 319 bp, Homo sapiens
gacatccagatgacccagtctccatcttccctgtctgcatctgtaggagacagagtcaccatcacttgccgggcaagtcagaacattagcacctatttaaattggtatcaccacaaaccagggcaagcccctaagctcctgatctatgctgcatccagtttgttaagtggggtcccatcaaggttcagtggcagtggatctgggacagatttcactctcaccatcagcagtctgcaacctgcagattttgcaacttactactgtcaagagagtgacaggaccctcggttttggccaggggaccaagctggagatcaaac

SEQ ID NO: 8294 - DNA, 325 bp, Homo sapiens; identical to SEQ ID NO: 903

SEQ ID NO: 8295 - DNA, 334 bp, Homo sapiens
cagtctgtggtgacgcagccgccctcagtgtctggggccccagggcagagggtcaccatctcctgcactgggagcagctccaacatcggggcagattatgatgtacactggtaccagcagcttccaagaacagcccccaaactcctcatctatgataacagcaatcggccctcaggggtccctgaccgattctctggctccaagtctggcacctctgcctccctggccatcactggcctccaggctgaggatgaggctgattattactgccagtcctatgacagcagcctgagtggttatgtcttcggaactgggaccaaggtcaccgtcctag

SEQ ID NO: 8296 - DNA, 322 bp, Homo sapiens
gaaattgtgttgacacagtctccagccaccctgtctttgtctccaggggaaagagccaccctctcctgcagggccagtcagagtgttagcagctacttagcctggtaccaacagaaacctgaccgggctcccaggctcctcatttatgatgcatccaaaagggccactgacatcccagccaggttcagtggcagtgggtctgggacagacttcactctcaccatcagcagcctagaggctgaagattttgcaacttattactgtcagcagcgtagcaactggcctctcactttcggcggagggaccagggtggagatcaaac

SEQ ID NO: 8297 - DNA, 325 bp, Homo sapiens
gaaattgtgttgacgcagtctccagccaccctgtctttgtctccaggggaaagagccaccctctcctgcggggccagtcggagtgttagcagcagctacttagcctggtaccagcagacacctggcctggcgcccaggctcgtcatgtatgatgcatccaccagggcccctggcatcccagacaggttcagtggcagtgggtctgggacagacttcactctcaccatcagcagactggagcctgaagattttgcagtgtattactgtcaacagtatgatacctcaccattcactttcggccctgggaccaaagtggatatcaaac

SEQ ID NO: 8298 - DNA, 334 bp, Homo sapiens; identical to SEQ ID NO: 1029

SEQ ID NO: 8299 - DNA, 322 bp, Homo sapiens
gacatccagatgacccagtctccatcttctgtgtctgcatctgtaggagacagagtcaccatcacttgtcgggcgagtcaggttattacctactggttagcctggtatcagcagagaccagggaaagcccctaagctcctgatctatgctgcatccagtttgcaaagtggggtcccatcaaggttcagcggcagtggatctgggacagatttcactctcactatcagcagcctgcagcctgaagattttgcaacttactattgtcaacaggctaacagtttcccgatcaccttcggccaagggacacgactggagattaaac

SEQ ID NO: 8300 - DNA, 331 bp, Homo sapiens
tcctatgtgctgactcagccaccctcgatgtcagtggccccaggacagacggccaggatttcctgtgggggaaacaacattggaagtaaaagtgtgcactggtaccagcagaagccaggccaggcccctgtgctggtcgtctttgatgatagcgaccggccctcagggatccctgagcgattctctggctccaactctgggaacacggccaccctgaccatcagcagggtcgaagccggggatgaggccgactattggtgtcaggtgtgggatggtactagtgatcatccgggggtggtattcggcggagggaccaagctgaccgtcctag

SEQ ID NO: 8301 - DNA, 322 bp, Homo sapiens; identical to SEQ ID NO: 1668

SEQ ID NO: 8302 - DNA, 322 bp, Homo sapiens
gccatccggatgacccagtctccatcctcattctctgcatctacaggagacagagtcaccatcacttgtcgggcgagtcagggtattagcagttatttagcctggtatcagcaaaaaccagggaaagcccctaagctcctgatctatgctgcatccactttgcaaagtggggtcccatcaaggttcagcggcagtggatctgggacagatttcactctcaccatcagcagcctgcagcctgaagattttgcaacttattactgtcaacagtattatagttaccctcggacgttcggccaagggaccaaggtggaaatcaaac

SEQ ID NO: 8303 - DNA, 316 bp, Homo sapiens
tcctatgagctgactcagccaccctcagtgtccgtgtccccaggacagacagccagcatcacctgctctggagataaattgggacataaatatgctttctggtatcagcagaggccaggccagtcccctgtgctggtcatctatgaagataccaagcggccctcagggatccctgagcgattctctggctccaactctgggaacacagccactctgaccatcagcgggacccaggctatggatgaggctgactattactgtcaggcgtgggacagcagcacggtgttcggcggagggaccaagctgaccgtcctag

SEQ ID NO: 8304 - DNA, 333 bp, Homo sapiens
cagtctgccctgattcagcctccctccgtgtccgggtctcctggacagtcagtcaccatctcctgcactggaaccagcagtgatgttgggagttatgactatgtctcctggtaccaacagcacccaggcacagtccccaaacccatgatctacaatgtcaatactcagccctcaggggtccctgatcgtttctctggctccaagtctggcaatacggcctccatgaccatctctggactccaggctgaggacgaggctgattattagtgctgctcatatacaagcagtgccacttaatggtcttcggaactgggaccaaggtcaccgtcctag

SEQ ID NO: 8305 - DNA, 322 bp, Homo sapiens
gtcatctggatgacccagtctccatccttactctctgcatctacaggagacagagtcaccatcagttgtcggatgagtcagggcattagcagttatttagcctggtatcagcaaaaaccagggaaagcccctgagctcctgatctatgctgcatccactttgcaaagtggggtcccatcaaggttcagtggcagtggatctgggacagatttcactctcaccatcagttgcctgcagtctgaagattttgcaacttattactgtcaacagtattatagtttccctcgaacgttcggccaagggaccaaggtggaaatcaaac

SEQ ID NO: 8306 - DNA, 322 bp, Homo sapiens
gaaatagtgatgacgcagtctccagccaccctgtctgtgtctccaggggaaagagccaccctctcctgcagggccagtcagagtgttagcagcaacttagcctggtaccagcagaaacctggccaggctcccaggctcctcatctatggtgcatccaccagggccactggtatcccagccaggttcagtggcagtgggtctgggacagagttcactctcaccatcagcagcctgcagtctgaagattttgcagtttattactgtcagcagtataataactggcctccggagttcggccaagggacacgactggagattaaac

SEQ ID NO: 8307 - DNA, 323 bp, Homo sapiens
tcctatgagctgacacagccaccctcggtgtcagtgtccccaggacaaacggccaggatcacctgctctggagatgcattgccaagaaaatatgcttattggtaccagcagaagtcaggccaggcccctgtgctggtcatctatgaggacagcaaacgaccctccgggatccctgagagattctctggctccagctcagggacaatggccaccttgactatcagtggggcccaggtggaggatgaagctgactactactgttactcaacagacagcagtggtaatcatagggtgttcggcggagggaccaagctgaccgtcct

SEQ ID NO: 8308 - DNA, 322 bp, Homo sapiens; identical to SEQ ID NO: 3949

SEQ ID NO: 8309 - DNA, 322 bp, Homo sapiens; identical to SEQ ID NO: 3970

SEQ ID NO: 8310 - DNA, 322 bp, Homo sapiens; identical to SEQ ID NO: 1668

SEQ ID NO: 8311 - DNA, 322 bp, Homo sapiens; identical to SEQ ID NO: 897

SEQ ID NO: 8312 - DNA, 322 bp, Homo sapiens
gccatccggatgacccagtctccatcctcattctctgcatctacaggagacagagtcaccatcacttgtcgggcgagtcagggtattagcagttatttagcctggtatcagcaaaaaccagggaaagcccctaagctcctgatctatgctgcatccactttgcaaagtggggtcccatcaaggttcagcggcagtggatctgggacagatttcactctcaccatcagctgcctgcagtctgaagattttgcaacttattactgtcaacagtattatagttaccctcgggcgttcggccaagggaccaaggtggaaatcaaac

SEQ ID NO: 8313 - DNA, 325 bp, Homo sapiens
tcctatgacctgacacagccaccctcggtgtcagtgtccccaggacagacggccaagatcacctgctctggagatgcattgccaaagcattatgcttattggtaccagcagatgccaggccaggcccctgtgctggtgatatataaagacagtgagcggccctcagggatccctgagcgattctctggctccagctcagggacaacagtcacgttgaccatcagtggagtccaggcagaagatgaggctgactactattgtcaatcagcagacagtagtggtacttatgtggtattcggcggagggaccaagctgaccgtcctag

SEQ ID NO: 8314 - DNA, 322 bp, Homo sapiens; identical to SEQ ID NO: 927

SEQ ID NO: 8315 - DNA, 325 bp, Homo sapiens
gaaattgtgttgacgcagtctccaggcaccctgtctttgtctccaggggaaagagccaccctctcctgcagggccagtcagagtgttagcagcagctccttagcctggtaccagcagaaacctggccaggctcccaggctcctcatctatggtgcatccagcagggccactggcatcccagacaggttcagtggcagtgggtctgggacagacttcactctcaccatcagcagactggagcctgaagattttgcagtgtattactgtcagcagtatggtagctcactagggacgttcggccaagggaccaaggtggaaatcaaac

SEQ ID NO: 8316 - DNA, 330 bp, Homo sapiens
cagtctgccctgactcagcctgcctccgtgtctgggtctcctggacagtcgatcaccatctcctgcactggaaccagcagtgacgttggtgcttataactatgtctcctggtaccaacaacacccaggcaaagcccccaaactcatgatttatgatgtcagtaatcggccctcaggggtttctaatcgcttctctggctccaagtctggcaacacggcctccctgaccatctctgggctccaggctgaggacgaggctgattattactgcagctcatatacaagcagcagcattgtgttattcggcggagggaccaagctgaccgtccta

SEQ ID NO: 8317 - DNA, 322 bp, Homo sapiens
gaaatagtgatgacgcagtctccagccaccctgtctgtgtctccaggggaaagagccaccctctcctgcagggccagtcaaggtgttagcagcaacttagcctggtaccagcagaaacctggccaggctcccaggctcctcatctatggtgcatccaccagggccactggtatcccagccaggttcagtggcagtgggtctgggacagagttcactctcaccatcagcaccctgcagtctgaagattttgcagtttattactgtcagcagtatgataactggccgctcactttcggcggagggaccaaggtggagatcaaac

SEQ ID NO: 8318 - DNA, 322 bp, Homo sapiens; identical to SEQ ID NO: 3953

SEQ ID NO: 8319 - DNA, 322 bp, Homo sapiens
gacatccagatgacccagtctccttccaccctgtctgcatctgtaggagacagagtcaccatcacttgccgggccagtcagagtattcgtagctggttggcctggtatcagcagaaaccagggaaagcccctaagctcctgatctataaggcgtctagtttagaaagtggggtcccatcaaggttcagcggcagtggatctgggacagaattcactctcaccatcagcagcctgcagcctgatgactttgcaacttattactgccaacagtatagtagttattcattcactttcggccctgggaccaaagtggatatcaaac

SEQ ID NO: 8320 - DNA, 331 bp, Homo sapiens
cagtctatgttgacgcagccgccctcagtgtctgcggccccaggacagagggtcaccatctcctgctctggaagcagctccaacattgggaataattatgtatcctggtaccggcagctccccggaacagcccccaaactcctcatttatgacaataataagcgtccctcagggattcctgaccgattctctggctccaagtctggcacgtcagccaccctgggcatcaccggactccagactggggacgaggccgattattactgcggaacatgggatagcagcctgagtgctgtggtattcggcggagggaccaagctgaccgtcctag

SEQ ID NO: 8321 - DNA, 322 bp, Homo sapiens; identical to SEQ ID NO: 4807

SEQ ID NO: 8322 - DNA, 334 bp, Homo sapiens
gatgttgtgatgactcagtctccactctccctgcccgtcacccttggacagccggcctccatctcctgcaggtctagtcaaagcctcgtttacgctgatggagacacctacttgcattggtttcagcagaggccaggccaatctccaaggcgcctaatttataaggtttctaaccgggactctggggtcccagacagattcagcggcagtgggtcaggcactgatttcacactgaaaatcagcagggtggaggctgaggatgttggggtttactactgcatgcaaggtacactgggggtcaccttcggccaagggacacgactggagattaaac

SEQ ID NO: 8323 - DNA, 166 bp, Homo sapiens
ttcccaggtggggtcccatcaaggttcagcggcagtggatctgggacggattacactctcaccatcagcagcctgcagcctgaagattttgctacttattactgtcaacagtattatagtacccctccactcactttcggcggagggaccaaggtggagatcaaac

SEQ ID NO: 8324 - DNA, 320 bp, Homo sapiens
gaaatagtgatgacgcagtctccagccaccctgtctgtgtctccaggggaaagagccaccctctcctgcagggccagtcagagtgttagcagcaacttagcctggtaccagcagaaacctggccaggctcccaggctcctcatctatggtgcatccaccagggccactggtatcccagccaggttcagtggcagtgggtctgggacagaattcactctcaccatcagcagcctgcagtctgaagattttgcagtttattactgtcagcagtataataactggccggacgttcggccaagggaccaaggtggaaatcaaac

SEQ ID NO: 8325 - DNA, 325 bp, Homo sapiens
tcctatgagctgacacagccaccctcggtgtcagtgtccccaggacagacggccaggatcacctgctctggagatgcattgccaaagcaatatgcctattggtaccagcagaagccaggccaggcccctgtggtggtgatatataaagacagtgagaggccctcagggatccctgagcgattctctggctccagctcagggacaacagtcacgttgaccatcagtggagtccaggcagaagatgaggctgactattactgtcaatcagcagacaggagtggtacttatgtggtattcggcggagggaccaagctgaccgtcctag

SEQ ID NO: 8326 - DNA, 331 bp, Homo sapiens
tcctatgtgctgactcagccaccctcggtgtcagtggccccaggacagacggccaggatgacctgtgggggaaacaacattggaagtgagaatgtgtactggtaccagcagaagccaggccaggcccctgtgctggtcatcaatgaagatagcgaccggccctcagggatccctgagcgattctctggctccaactctgggaacacggccaccctgaccatcagcagggtcgaagtcggggatgaggccgactattattgtcaggtgtgggatagtagtagtgatcttccgggggtggtattcggcggagggaccaagctgaccgtcctag

SEQ ID NO: 8327 - DNA, 325 bp, Homo sapiens; identical to SEQ ID NO: 5941

SEQ ID NO: 8328 - DNA, 322 bp, Homo sapiens; identical to SEQ ID NO: 925

SEQ ID NO: 8329 - DNA, 328 bp, Homo sapiens
gacatccagatgacccagtctccatcctccctgtctgcatctgtaggagacagagtcaccatcacttgccaggcgagtcaggacatttccaactatttaaattggtatcagcagaaaccagggaaagcccctaaactcctgatctacgatgcttccaatttggaaacaggggtcccatcaaggttcagtggaagtggatctgggacagattttactttcaccatcagcagcctgcagcctgaagatattgcaacatattactgtcaacagtatgataatctcctccagatgtacacttttggccaggggaccaagctggagatcaaac

SEQ ID NO: 8330 - DNA, 325 bp, Homo sapiens; identical to SEQ ID NO: 965

SEQ ID NO: 8331 - DNA, 319 bp, Homo sapiens
gacatccagatgacccagtctccatcctccctgtctgcatctgtaggagacagagtcaccatcacttgccgggcaagtcagagcattagcagctatttaaattggtatcagcagaaaccagggaaagcccctaagctcctgatctatgctgcatccagtttgcaaagtggggtcccatcaaggttcagtggcagtggatctgggacagatttcactctcaccatcagcagtctgcaacctgaagattttgcaacttactactgtcaacagagttacagtacccccaccttcggccaagggacacgactggagattaaac

SEQ ID NO: 8332 - DNA, 325 bp, Homo sapiens
gaaattgtgttgacgcagtctccaggcaccctgtctttgtctccaggggaaagagccaccctctcctgcagggccagtcagagtgttggcagcggctccttagcctggtaccagcacaaacctggccaggctcccagactcctcatctatgttacatccagcagggccactggcatcccagacaggttcagtggcagtgggtctgggacagacttcactctcaccatcagcagactggagcctgaggattttgcagtgtattactgtcagcagtatgatagctcaccgatcaccttcggccaagggacacgactggagattaaac

SEQ ID NO: 8333 - DNA, 325 bp, Homo sapiens
gaaattgtgttgacgcagtctccaggcaccctgtctttgtctccaggggaaagagccaccctctcctgcagggccagtcagagtgttagcagcagctacttagcctggtaccagcagaaacctggccaggctcccaggctcctcatctatggtgcatccagcagggccactggcatcccagacaggttcagtggcagtgggtctgggacagacttcactctcaccatcagcagactggagcctgaagattttgcagtctattactgtcagcagtatggtaactcaccttacacttttggccaggggaccaagctggagatcaaac

SEQ ID NO: 8334 - DNA, 326 bp, Homo sapiens
gacatccagttgacccagtctccatcctccctgtctgcatctgtaggagacagagtcaccatcacttgccgggtgagtcagggcattagcagttatttaaattggtatcggcagaaaccagggaaagttcctaagctcctgatctatagtgcatccaatttgcaatctggagtcccatctcggttcagtggcagtggatctgggacagatttcactctcactatcagcagcctgcagcctgaagatgttgcaacttattacggtcaacggacttacaatgcccctgacgtggacgttcggccaagggaccaaggtggaaatcaaac

SEQ ID NO: 8335 - DNA, 322 bp, Homo sapiens; identical to SEQ ID NO: 8312

SEQ ID NO: 8336 - DNA, 322 bp, Homo sapiens
gaaatagtgatgacgcagtctccagccaccctgtctgtgtctccaggggaaagagccaccctctcctgcagggccagtcagagtgttagcagctacttagcctggtaccagcagaaacctggccaggctcccaggctcctcatctatggtgcatccactagggccactggtatcccagccaggttcagtggcagtgggtctgggacagagttcactctcaccatcagcagcctgcagtctgaagattttgcagtttattactgtcagcagtataataactggcctctcactttcggcggagggaccaaggtggagatcaaac

SEQ ID NO: 8337 - DNA, 325 bp, Homo sapiens
tcctatgtgctgactcagccaccctcagtgtcagtggccccaggaaagacggccaggattacctgtgggggaaacaacattggaagtaaaagtgtgcactggtaccagcagaagccaggccaggcccctgtggtggtcatctattatgatagcgaccggccctcagggatccctgagcgattctctggctccgactctgggaacacggccaccctgaccatcagcagggtcgaagccggggatgaggccgactattactgtcaggtgtgggatagtagtagtgatcgggtgctactcggcggagggaccaagctgaccgtcctag

SEQ ID NO: 8338 - DNA, 322 bp, Homo sapiens
gacatccggatgacccagtctccatcctccctgtctgcatctcttggagacagagtcaccatcacttgccgggcaagtcgggccataagtacctacttaaattggtatcaacagagaccagggagagcccctaaggccctgatctatgctgcatcctctttgcaaagtggggtctcatctaggttcagtggcagtggatctgggacagatttcactctcaccatcagcagtctgcaacctgaagattttggaacttacttctgtcaacagagttacaatacccctctcactttcggcggagggaccagggtggaggtcaaac

SEQ ID NO: 8339 - DNA, 331 bp, Homo sapiens
cagtctgccctgactcagcctgcctccgtgtctgggtctcctggacagtcgatcaccatctcctgcactggaaccagcagtgacgttggtggttataactatgtctcgtggtaccaacaacacccaggcaaagcccccaaactcatgatttatgatgtcagtaatcggccctcaggggtttctaatcgcttctctggctccaagtctggcaacacggcctccctgaccatctctgggctccaggctgaggacgaggctgattattactgcagctcatatacaagcagcagcaccgtggcattcggcggagggaccaagctgaccgtcctag

SEQ ID NO: 8340 - DNA, 331 bp, Homo sapiens; identical to SEQ ID NO: 7678

SEQ ID NO: 8341 - DNA, 322 bp, Homo sapiens
gaaatagtgatgacgcagtctccagccaccctgtctgtgtctccaggggaaagagccaccctctcctgcagggccagtcagagtgttggcagcaacttagcctggtaccggcagaaacctggccaggctcccaggctcctcatctatggtgcatccaccagggccactggtatcccagccaggttcagtggcagtgggtctgggacagagttcactctcaccatcagcagcctgcagtctgaggattttgcagtttattactgtcagcagtataataactggcctcagacttttggccaggggaccaagctggagatcaaac

SEQ ID NO: 8342 - DNA, 322 bp, Homo sapiens
gacatccagatgacccagtctccatcttccgtgtctgcatctgtaggagacagagtcaccatcacttgtcgggcgagtcagggtattagcagctggttagcctggtatcagcagaaaccagggaaagcccctaagctcctgatctatgctgcatccagtttgcaaagtggggtcccatcaaggttcagcggcagtggatctgggacagatttcactctcaccatcagcagcctgcagcctgaagattttgcaacttactattgtcaacaggctaacagtttccctccgaccttcggccaagggacacgactggagattaaac

SEQ ID NO: 8343 - DNA, 322 bp, Homo sapiens
gacatccagatgacccagtctccatcttccgtgtctgcatctgtaggagacagagtcaccatcacttgtcgggcgagtcagggtataacgacctggttagcctggtatcagcagaaaccagggaaagcccctaagctcctgatccattctgcatccactttgcaaagtggggtcccatcacggttcagcggccgtggatttgcgacatatttcactctcataatcagcagcgtgcagcctgaagattttgcaacttactattgtcaacaggctggcggtttcccgtccacttttggccaggggaccaagctggagatcaaac

SEQ ID NO: 8344 - DNA, 328 bp, Homo sapiens
gaaattgtgttgacacagtctccagccaccctgtctttgtctccaggggaaagagccaccctctcctgcagggccagtcagagtgttagcagctacttagcctggtaccaacagaaacctggccaggctcccaggctcctcatctatgatgcatccaacagggccactggcatcccagccaggttcagtggcagtgggtctgggacagacttcactctcaccatcagcagcctagagcctgaagattttgcagtttattactgtcaccggcgtagcaagtggcctcttacctacacttttggccaggggaccaagctggagatcaaac

SEQ ID NO: 8345 - DNA, 331 bp, Homo sapiens
cagtctgccctgactcagcctgcctccgtgtctgggtctcatgggcagtcgatcaccatctcctgcactggaaccagcagtgacgttggtggttataactatgtctcctggtaccaacaacacccaggcaaagcccccaaactcatgatttatgatgtcagcaatcggccctcaggggtttctaatcgcttctctggctccaagtctggcaacacggcctccctgaccatctctgggctccaggctgaggacgaggctgattattactgcagctcatatacaagcagcagcccttttgtcttcgggacttggaccaaggtcaccgtcctag

SEQ ID NO: 8346 - DNA, 334 bp, Homo sapiens
cagtctgccctgactcagcctcgctcagtgtccgggtctcctggacagtcagtcaccatctcctgcactggaaccagcagtgatgttggtggttataactatgtctcctggtaccaacagcacccaggcaaagcccccaaactcatgatttatgatgtcagtaagcggccctcaggggtccctgatcgcttctctggctccaagtctggcaacacggcctccctgaccatctctgggctccaggctgaggatgaggctgattattactgctgctcatatgcaggcagctacactaattatgtcttcggaactgggaccaaggtcaccgtcctag

SEQ ID NO: 8347 - DNA, 322 bp, Homo sapiens
tcctatgagctgactcagccaccctcagtgtccgtgtccccaggacagacagccagcatcacctgctctggagataaattgggggataaatatgcttgctggtatcagcagaagccaggccagtcccctgtgttggtcatctatcaagatagcaagcggccctcagggatccctgagcgattctctggctccaactctgggaacacagccactctgaccatcagcgggacccaggctatggacgaggctgactattactgtcaggcgtgggacagcagcactgaggtggtattcggcggagggaccaagctgaccgtcctag

SEQ ID NO: 8348 - DNA, 334 bp, Homo sapiens
cagtctgtgctgacgcagccgccctcagtgtctggggccccagggcagagggtcaccatctcctgcactgggagcagctccaacatcggggcaggttatgatgtacactggtaccagcagcttccaggaacagcccccaaattcctcatctatggtaacagcaatcgaccctcaggggtccctgaccgattctctggctccaagtctggcacctcagcctccctggccatcactgggctccaggccgaggatgaggctgattattactgccagtcctatgacagcagcctgagtggttatgtcttcggaactgggaccaaggtcaccgtcctag

SEQ ID NO: 8349 - DNA, 331 bp, Homo sapiens
cagtctgtgctgactcagccaccctcagcgtctgggacccccgggcagagggtcaccatctcttgttctggaagcagctccaacatcggaagtaatactgtaaactggtaccagcagctcccaggaacggcccccaaactcctcatctatagtaataatcagcggccctcaggggtccctgaccgattctctggctccaagtctggcacctcagcctccctggccatcagtgggctccagtctgaggatgaggctgattattactgtgcagcatgggatgacagcctgaagggcgtggtattcggcggagggaccaagctgaccgtcctag

SEQ ID NO: 8350 - DNA, 331 bp, Homo sapiens
cagtctgccctggctcagcctgcctccgtgtctgggtctcctggacagtcgatcaccatctcctgcactggaaccagcagtgaccttggtagttataactatgtctcctggtaccaacaacacccaggcaaagcccccaaactcgtgatttatgatgtcactaatcggccctcaggggtttctagtcgcttctctggctccaagtctggcaacacggcctccttgaccatctctgggctccaggctgaggacgagggtgattattactgcagctcatatacaagcagcaatactgtgctattcggcggagggaccaagctgaccgtcctag

SEQ ID NO: 8351 - DNA, 319 bp, Homo sapiens
gaaattgtgttgacacagtctccagccaccctgtctttgtctccaggggaaagagccaccctctcctgcagggccagtcagagtgttagcagctacttagcctggtaccaacagaaacctggccaggctcccaggctcctcatctatgatgcatccaacagggccactggcatcccagccaggttcagtggcagtgggtctgggacagacttcactctcaccatcagcagcctagagcctgaagattttgcagtttattactgtcagcagcgtagcaactggctcactttcggcggagggaccaaggtggagatcaaac

SEQ ID NO: 8352 - DNA, 340 bp, Homo sapiens
gacatcgtgatgacccagtctccagactccctggctgtgtctctgggcgagagggccaccatcaactgcaagtccagccagagtgttttatacacctccaacaataagaactacttaacttggtaccagcagaaaccaggacagcctcctaagctgctcatttactgggcatctacccgggaatccggggtccctgaccgattcagtggcagcgggtctgggacagatttcactctcaccatcagcagcctgcaggctgaagatgtggcagtttattactgtcaccaatattatagtactcctccgacgttcggccaagggaccaaggtggaaatcaaac

SEQ ID NO: 8353 - DNA, 319 bp, Homo sapiens
tcctatgagctgactcagccaccctcagtgtccgtgtccccaggacagacagccagcatcacctgctctggagataaattgggggataaatatgcttgctggtatcagcagaagccaggccagtcccctttactggtcatctatcaagataccaagcggccctcagggatccctgagcgattctctggctccaactctgggaacacagccactctgaccatcagcgggacccaggctatggatgaggctgactattactgtcaggcgtgggacagcagcactgtgatattcggcggagggaccaagctgaccgtcctag

SEQ ID NO: 8354 - DNA, 322 bp, Homo sapiens
gacatccagatgacccagtctccatcctccctgtctgcatctgtaggagacagagtcaccatcacttgccgggccagtcagggcattagcagttatttagcctggtatcagcaaaaaccagggaaagcccctaagctcctgatctatgctgcatccactttgcaaagtggggtcccatcaaggttcagcggcagtggatctgggacagaattcactctcacaatcagcaacctgcagcctgaagattttgcaacttattactgtcaacagcttaatagttacccgctcactttcggcggagggaccaaggtggagatcaaac

SEQ ID NO: 8355 - DNA, 322 bp, Homo sapiens
gacatccagatgacccagtctccatcctccctgtctgcatctgtaggagacagagtcaccatcacttgccgggcaagtcagagcattagcagctatttaaattggtatcagcagaaaccagggaaagcccctaagctcctgatctatgctgcatccagtttgcaaagtggggtcccatcaaggttcagtggcagtggatctgggacagatttcactctcaccatcagcagtctgcaacctgaagattttgcaacttactactgtcaacagagttacagtaccctttggacgttcggccaagggaccaaggtggaaatcaaac

SEQ ID NO: 8356 - DNA, 322 bp, Homo sapiens
gacatccagatgacccagtctccttccaccctgtctgcatctgtaggagacagagtcaccatcacttgccgggccagtcagagtgttagtacctggttggcctggtatcagcagaaatcagggaaagcccctaagctcctgatctataaggcgtctagtttagaaagtggggtcccatcaaggttcagcggcagtggatctgggacagaattcactctcaccatcagcagcctgcagcctgatgattttgcaacttattactgccaacagtataatagttatccgtacacttttggccaggggaccaagctggagatcaaac

SEQ ID NO: 8357 - DNA, 322 bp, Homo sapiens
gacatccagatgacccagtctccatcttccgtgtctgcatctgcaggagacagagtcaccatcacttgtcgggcgagtcaggatattagcagctggttagcctggtatcagcagaaaccagggaaagcccctaagctcctgatctatgctgcatccagtttgcaaagtggggtcccatcaaggttcagcggcagtggatctgggacagatttcactctcaccatcagcagcctgcagcctgaagattttgcaacttactattgtcaacaggctaacagtttccctatcaccttcggccaagggacacgactggagattaaac

SEQ ID NO: 8358 - DNA, 322 bp, Homo sapiens
gaaattgtgttgacacagtctccagccaccctgtctttgtctccaggggaaagagccaccctctcctgcagggccagtcagagtgttagcagctacttagcctggtaccaacagaaacctggccaggctcccaggctcctcatctatgatgcatccaacagggccactggcatcccagccaggttcagtggcagtgggtctgggacagacttcactctcaccatcagcagcctagagcctgaagattttgcagtttattactgtcagcagcgtagcaactggcggggcacttttggccaggggaccaagctggagatcaaac

SEQ ID NO: 8359 - DNA, 328 bp, Homo sapiens
gaaattgtgttgacacagtctccagccaccctgtctttgtctccaggggaaagagccaccctctcctgcagggccagtcagagtgttgccagctacttagcctggtaccaacagaaacctggccagcctcccaggctcctcatctatgatgcatccaacagggccactggcatcccagccaggttcagtggcagtgggtctgggacaggcttcactctcaccatcagcagcctagagcctgaagattttgcagtttattactgtcagcagcgtagcaactggcctccgccgtacacttttggccaggggaccaagctggagatcaaac

SEQ ID NO: 8360 - DNA, 316 bp, Homo sapiens
tcctatgagctgactcagccaccctcagtgtccgtgtccccaggacagacagccagcatcacctgctctggagataaattgggggataaatatgcttgctggtatcagcagaagccaggccagtcccctgtgctggtcatctatcaagatagcaagcggccctcagggatccctgagcgattctctggctccaactctgggaacacagccactctgaccatcagcgggacccaggctatggatgaggctgactattactgtcaggcgtggggcagcactggcgtcttcggaactgggaccaaggtcaccgtcctag

SEQ ID NO: 8361 - DNA, 325 bp, Homo sapiens
gacatccagatgacccagtctccttccaccctgtctgcatctgtaggagacagagtcaccatcacttgccgggccagtcagagtattagtagctggttggcctggtatcagcagaaaccagggaaagcccctaagctcctgatctataaggcgtctagtttagaaagtggggtcccatcaaggttcagcggcagtggatctgggacagaattcactctcaccatcagcagcctgcagcctgatgattttgcaacttattactgccaacagtataatagttattcggggatcactttcggccctgggaccaaagtggatatcaaac

SEQ ID NO: 8362 - DNA, 322 bp, Homo sapiens
gaaatagtgatgacgcagtctccagccaccctgtctgtgtctccaggggaaagagccaccctctcctgcagggccagtcagagtgttagcagcaacttagcctggtaccagcagaaacctggccaggctcccaggctcctcatctatggtgcatccaccagggccactggtatcccagccaggttcagtggcagtgggtctgggacagagttcactctcaccatcagcagcctgcagtctgaagattttgcagtttattactgtcagcagtataataactggcctcagacgttcggccaagggaccaaggtggaaatcaaac

SEQ ID NO: 8363 - DNA, 330 bp, Homo sapiens
cagtctgtgctgacgcagccgccctcagtgtctggggccccagggcagagggtcaccatctcctgcactgggagcagctccaacatcggggcaggttatgatgtacactggtaccagcaacttccaggaacagcccccaaactcctcatctatggtaacaacaatcgaccctcaggggtccctgaccgattctctggctccaagtctggcacctcagcctccctggccatcactgggctccaggctgaggatgagactgattattactgccagtcctttgacagcaccctgggtgtggtactcggcggagggaccaaggtgaccgtccta

SEQ ID NO: 8364 - DNA, 331 bp, Homo sapiens
gagattgtgttgacgcagtctccaggcaccctgtccttgtctccaggggaaagggccaccctctcctgcagggccagtcagagtgtcagcagcagcgacttagcctggtaccagcatacacctggccaggcgcccaggctcctcatctcttatgcatccagcagggccgctggcatcccagacaggttcagtggcagtgggtctgggacagacttcactctcaccatcagcagactggagcctgaggattttgcagtgtattactgtcagcactatgttaactcacctcgagggtacacttttggccaggggaccaggctggcgatcaaac

SEQ ID NO: 8365 - DNA, 322 bp, Homo sapiens; identical to SEQ ID NO: 3870

SEQ ID NO: 8366 - DNA, 328 bp, Homo sapiens
gacatccagatgacccagtctccatcctccctgtctgcatctgtaggagacagagtcaccatcacttgccaggcgagtcaggacattagcaactatttaaattggtatcagcagaaaccagggaaagcccctaagctcctgatctacgatgcatccaatttggaaacaggggtcccatcaaggttcagtggaagtggatctgggacagattttactttcaccatcagcagcctgcaccctgaagattttgcaacatattcctgtcaacactatcattatctccctccggggatcaccttcggccaagggacacgactggagattaaac

SEQ ID NO: 8367 - DNA, 328 bp, Homo sapiens
cagactgtggtgactcaggagccctcactgactgtgtccccaggagggacagtcactctcacctgtgcttccagcactggagcagtcaccagtggttactatccaaactggttccagcagaaacctggacaagcacccaggacactgatttatagtacaagcaacaaatatttttggacgcctgcccggttctcaggctccctccttgggggcaaagctgccctgacactgtcaggtgtgcagcctgaggacgaggctgactattactgcctgctctactatgatggtgcttgggtgttcggcggagggaccaagctgaccgtcctag

SEQ ID NO: 8368 - DNA, 322 bp, Homo sapiens
gacatccagatgacccagtctccttccaccctgtctgcatctgtaggagacagagtcaccatcacttgccgggccagtcagagtattggtacctggttggcctggtatcagcaggaaccagggaaagcccctaagctcctgatctataaggcgtctagtttagaaactggggtcccatcgaggttcagcggcagtggatttgggacagaattcactctcaccatcagcagcctgcagcctgatgattttgcaacttattactgccaacagtataatggttattttttcactttcggccctgggaccaaagtggatatgaaac

SEQ ID NO: 8369 - DNA, 337 bp, Homo sapiens
gatgttgtgatgactcagtctccactctccctgcccgtcacccttggacagccggcctccatctcctgcaggtctagtcaaagcctcgtttacagtgatggaaacacctacttgtattggtttcagcagaggccaggccaatctccaaggcgcctcatttatgaggtttctaaccgggactctggggtcccagacagattcagcggcagtgggtcaggcactgatttcacactgaaaatcagcagggtggaggctgaggatgttggggtttattactgcatgcaaggtacacactggcctccggctttcggccctgggaccaaagtggatatcaaac

SEQ ID NO: 8370 - DNA, 334 bp, Homo sapiens
cagtctgtgctgacgcagccgccctcaatgtctggggccccagggcagagggtcaccctctcctgcactgggagcaactccaacatcggggcaggctatgatgtacactggtaccagcagcttccaggaacagcccccaaactcctcatctacggtaacaacaatcggccctcaggggtccctgaccgattctctggctccaagtctggcacctcagcctccctggccatcactgggctccaggctgaggatgaggctgattattactgccagtcctatgacagcagcctgagtgatttggtgttcggcggagggaccaagctgaccgtcctag

SEQ ID NO: 8371 - DNA, 340 bp, Homo sapiens
gacatcgtgatgacccagtctccagactccctggctgtgtctctgggcgagagggccaccatcaactgcaagtccagccagagtgttttatacagctccaacaataagaactacttagcttggtaccagcagaaaccaggacagcctcctaagctgctcatttactgggcatctacccgggaatccggggtccctgaccgattcagtggcagcgggtctgggacagatttcactctcaccatcagcagcctgcaggctgaagatgtggcagtttattactgtcagcaatattatagtactcctggcactttcggccctgggaccaaagtggatatcaaac

SEQ ID NO: 8372 - DNA, 331 bp, Homo sapiens; identical to SEQ ID NO: 7678

SEQ ID NO: 8373 - DNA, 325 bp, Homo sapiens
tcctatgagctgacacagccaccctcggtgtcagtgtccccaggacagacggccaggatcacctgctctggagatgcattgccaaagcaatatgcttattggtaccagcagaagccaggccaggcccctgtgctggtgatatataaagacagtgagaggccctcagggatccctgagcgattctctggctccagctcagggacaacagtcacgttgaccatcagtggagtccaggcagaagatgaggctgactattactgtcaatcagcagacagcagtggtacttcttatgtcttcggaactgggaccaaggtcaccgtcctag

SEQ ID NO: 8374 - DNA, 325 bp, Homo sapiens
gaaattgtgttgacgcagtctccaggcaccctgtctttgtctccaggggaaagagccaccctctcctgcagggccagtcagagtgttagcagcagctacttagcctggtaccagcagaaacctggccaggctcccaggctcctcatctatggtgcatccagcagggccactggcatcccagacaggttcagtggcagtgggtctgggacagacttcactctcaccatcagcagactggagcctgaagattttgcagtgtattactgtcagcagtatggtagctcacctctcacttttggccaggggaccaagctggagatcaaac

SEQ ID NO: 8375 - DNA, 322 bp, Homo sapiens
gacatccagatgacccagtctccatcctccctgtctgcatctgtaggagacagagtcaccatcacttgtcgggcaagtcaggacattagaaatgatttagcctggtatcagcagaagtcagggaaagcccctaagcgcctgatctatggtgcatccaacttgcaaagtggagtcccgtcacggttcagtggcagtggatctgggacagaattcactctcacaatcagcagcctgcagcctgaagattctgcaactttttactgtctacaacataatactttcccgtgggcattcggccaagggaccaaggtggaaatcaaac

SEQ ID NO: 8376 - DNA, 340 bp, Homo sapiens
gatattgtgatgacccagactccactctcctcgcctgtcacccttggacagccggcctccatctccttcaggtctagtcaaagcctcgtacacagtgatggaaacacctacttgagttggcttcagcagaggccaggccagcctccaagactcctaatttataaggtttctaaccggttctctggggtcccagacagattcagtggcagtggggcagggacagatttcacactgaaaatcagcagggtggaagctgaggatgtcggggtttattactgcacgcaagctacacaatttcccccgtacacttttggccaggggaccaagctggagatcaaac

SEQ ID NO: 8377 - DNA, 325 bp, Homo sapiens
tcctatgtgctgactcagccaccctcggtgtcagtggccccaggacagacggccaggattacctgtgggggaaacaacattggaagtaaaagtgtgcactggtaccagcagaagccaggccaggcccctgtcctggtcgtctatgatgatagcgaccggccctcagggatccctgagcgattctctggctccaactctgggaacacggccaccctgaccatcagcagggtcgaagccggggatgaggccgactattactgtcaggtgtgggatagtagtagtgatcatgtggtattcggcggagggaccaagctgaccgtcctag

SEQ ID NO: 8378 - DNA, 337 bp, Homo sapiens
gacatcgtgatgacccagtctccagactccctggctgtgtctctgggcgagagggccaccatcaactgcaagtccagccagagtgttttatacagctccaacaataagaactacttagcttggtaccagcagaaaccaggacagcctcctaagctgctcatttactgggcatctacccgggaatccggggtccctgaccgattcagtggcagcgggtctgggacagatttcactctcaccatcagcagcctgcaggctgaagatgtggcagtttattactgtcagcaatattatagtaccccccttttcggccctgggaccaaagtggatatcaaac

SEQ ID NO: 8379 - DNA, 322 bp, Homo sapiens
gaaattgtgatgacgcagtccccagccaccctgtcggtgtctccaggagaaagagtcaccctctcctgcagggccagtcagagtgttggcagcaacttggtctggtaccagcagaaacctggccaggctcccaggctcctcatctatggtgcatccaccacggccactggtgttccagccaggttcagtggcagtgggtctgggacagagttcaccctcaccatcagcaacctgcagtctgaagattgtgcagtttattactgtcagcagaattataactggccgggcaccttcggccaagggacacgactggaggctaaac

SEQ ID NO: 8380 - DNA, 325 bp, Homo sapiens
gaaattgtgttgacgcagtctccaggcaccctgtctttgtctccaggggaaagagccaccctctcttgcagggccagtcagagtgctagcagcagctacttagcctggtaccagcagaaacctggccaggctcccaggctcctcatctatggtgcatccagcagggccactggcatcccagacaggttcagtggcagtgggtctgggacagacttcactctcaccatcagcagactggagcctgaagattttgcagtgtattactgtcagcagtatggtagctcacgggggacttttggccaggggaccaagctggagatcaaac

SEQ ID NO: 8381 - DNA, 331 bp, Homo sapiens
cagtctgccctgactcagcctgcctccgtgtctgggtctcctggacagtcgaccaccatctcctgcactggaaccagcagtgacgttggtggttataactatgtctcctggtaccaacagcacccaggcaaagcccccaaactcatgatttatgatgtcagttatcggccctcaggggtttctaatcgcttctctggctccaagtctggcaacacggcctccctgaccatctctgggctccaggctgaggacgaggctgattattactgcagctcatatacaagcagcagcggttatgtcttcggaactgggaccaaggtcaccgtcctag

SEQ ID NO: 8382 - DNA, 328 bp, Homo sapiens
gaaattgtgttgacgcagtctccaggcaccctgtctttgtctccaggggaaagagccaccctctcctgcagggccagtcagagtgttagcagcagctacttagcctggtaccagcagaaacctggccaggctcccaggctcctcatctatggtgcatccagcagggccactggcatcccagacaggttcagtggcagtgggtctgggacagacttcactctcaccatcagcagactggagcctgaagattttgcagtgtattactgtcagcagtatggtagctcacctcggcgaacgttcggccaagggaccaaggtggaaatcaaac

SEQ ID NO: 8383 - DNA, 322 bp, Homo sapiens
gacatccagatgacccagtctccttccaccctgtctgcatctataggagacagagtcaccatcacttgccgggccagtcagagtattagtagctggttggtctggtatcagcagaaaccagggaaagcccctaagctcctgatctataaggcgtctagtttagaaagtggggtcccatcaaggttcagcggcagtggatctgggacagaattcactctcaccatcagcagcctgcagcctgatgattttgcaacttattactgccaacagtatagtacttattctcagacgttcggccaagggaccaaggtggaaatcaaac

SEQ ID NO: 8384 - DNA, 340 bp, Homo sapiens; identical to SEQ ID NO: 803

SEQ ID NO: 8385 - DNA, 325 bp, Homo sapiens
tcctatgtgctgactcagccaccctcggtgtcagtggccccaggacagacggccaggattacctgtgggggaaacaacattggaagtaaaagtgtgcactggtaccagcagaagccaggccaggcccctgtgctggtcgtctatgatgatagcgaccggccctcagggatccctgagcgattctctggctccaactctgggaacacggccaccctgaccatcagcagggtcgaagccggggatgaggccgactattactgtcaggtgtgggatagtagtagtgatcatgtggtattcggcggagggaccaagctgaccgtcctag

SEQ ID NO: 8386 - DNA, 328 bp, Homo sapiens
gaaatagtgatgacgcagtctccagccaccctgtctgtgtctccaggggaaagagccaccctctcctgcagggccagtcagagtgttagcagcaacttagcctggtaccagcagaaacctggccaggctcccaggctcctcatctatgatgcatccaccagggccactggtatcccagccaggttcagtggcagtgggtctgggacagacttcactctcaccatcagcagcctgcagtccgaagattttgcagtttattactgtcagcaatataataactggcccccggggtacacttttggccaggggaccaagctggagatcaaac

SEQ ID NO: 8387 - DNA, 340 bp, Homo sapiens; identical to SEQ ID NO: 905

SEQ ID NO: 8388 - DNA, 322 bp, Homo sapiens
tcctatgagctgactcagccaccctcagtgtccgtgtccccaggacagacagccagcatcacctgctctggagataaattgggggataaatatgcttgctggtatcagcagaagccaggccagtcccctgtgctggtcatctatcaagatagcaagcggccctcagggatccctgagcgattctctggctccaactctgggaacacagccactctgaccatcagcgggacccaggctatggatgaggctgactattactgtcaggcgtgggacagcagcactggggtggtattcggcggagggaccaagctgaccgtcctag

SEQ ID NO: 8389 - DNA, 322 bp, Homo sapiens
gacatccagttgacccagtctccatccttcctgtctgcatctgtaggagacagagtcaccatcacttgccgggccagtcagggcattagcagttatttagcctggtatcagcaaaaaccagggaaagcccctaagctcctgatctatgctgcatccactttgcaaagtggggtcccatcaaggttcagcggcagtggatctgggacagaattcactctcacaatcagcagcctgcagcctgaagattttgcaacttattactgtcaacagcttgatagtcccatgtacacttttggccaggggaccaagctggagatcaaac

SEQ ID NO: 8390 - DNA, 322 bp, Homo sapiens
gacatccagttgacccagtctccatccttcctgtctgcatctgtaggagacagagtcaccatcacttgccgggccagtcagggcattagcagttatttagcctggtatcagcaaaaaccagggaaagcccctaagctcctgatctatgctgcatccactttgcaaagtggggtcccatcaaggttcagcggcagtggatctgggacagaattcactctcacaatcagcagcctgcagcctgaagattttgcaacttattactgtcaacagcttaatagttaccctttcactttcggccctgggaccaaagtggatatcaaac

SEQ ID NO: 8391 - DNA, 325 bp, Homo sapiens
tcctatgtggtgactcagccaccctcagtgccagtggccccaggaaagacggccaggattacctgtgggggaaacaacattggaagtcaaagtgtgcactggtaccagcagaagccaggccaggcccctgtgctggtcatctcttatgatagcgaccggccctctgggatccctgagcgattctctggctccaagtctgggaaaacggccaccctgaccatcagcagggtcgaagccggggatgaggccgactattactgtcaggtgtgggatagtagtagtgatcattgggtgttcggcggagggaccaagctgaccgtcctag

SEQ ID NO: 8392 - DNA, 328 bp, Homo sapiens
tcctatgagctgacacagccaccctcggtgtcagtgtccccaggacagacggccaggatcacctgctctggagatgcattgccaaagcaatatgcttattggtaccagcagaagccaggccaggcccctgtgttggtgatatataaagacagtgagaggccctcagggatccctgagcgattctctggctccagctcagggacaacagtcacgttgaccatcagtggagtccaggcagaagacgaggctgactattactgtcaatcagcagacagcagtggtccttatgatgtggtattcggcggagggaccaagctgaccgtcctag

SEQ ID NO: 8393 - DNA, 328 bp, Homo sapiens
gaaattgtgttgacacagtctccagccaccctgtctttgtctccaggggaaagagccaccctctcctgcagggccagtcagagtgttagcagctacttagcctggtaccaacagaaacctggccaggctcccaggctcctcatctatgatgcatccaacagggccactggcatcccagccaggttcagtggcagtgggtctgggacagacttcactctcaccatcagcagcctagagcctgaagattttgcagtttattactgtcagcagcgtagcaactggcctccgaaattcactttcggccctgggaccaaagtggatatcaaac

SEQ ID NO: 8394 - DNA, 325 bp, Homo sapiens
gaaattgtgttgacacagtctccagccaccctgtctttgtctccaggggaaagagccaccctctcctgcagggccagtcagagtgttagcagctacttagcctggtaccaacagaaacctggccaggctcccaggctcctcatctatgatgcatccaacagggccactggcatcccagccaggttcagtggcagtgggtctgggacagacttcactctcaccatcagcagcctagagcctgaagattttgcagtttattactgtcagcagcgtagcaactggcagtcgatcaccttcggccaagggacacgactggagattaaac

SEQ ID NO: 8395 - DNA, 332 bp, Homo sapiens
cagtctgccctgactcagcctgcctccgtgtctgggtctcctggacagtcgatcaccatctcctgcactggaaccagcagtgacgttggtggttataactatgtctcctggtaccaacagcacccaggcaaagcccccaaactcatgatttatgatgtcaataatcggccctcaggggtttctaatcgcttctctggctccaagtctggcaacacggcctccctgaccatctctgggctccaggctgaggacgaggctgattattactgcagctcatatacaagcagcagcactccttatgtcttcggaactgggaccaaggtcaccgtcct

SEQ ID NO: 8396 - DNA, 325 bp, Homo sapiens
gacatccagatgacccagtctccttccaccctgtctgcatctgtaggagacagagtcaccatcacttgccgggccagtcagactattagtagctggttggcctggtatcagcagaaaccagggaaagcccctaaactcctaatctataaggcgtctactttagaaagtggggtcccatcaaggttcagcggcagtgcatctgggacagaattcactctcaccatcaccagcctgcagcctgatgattttgcaacttattactgccaacagtataatagtttttctcgatattcttttggccaggggaccaagctggagatcaaac

SEQ ID NO: 8397 - DNA, 325 bp, Homo sapiens
gacatccagttgacccagtctccatccttcctgtctgcatctgtaggagacagagtcaccatcacttgccgggccagtcagggcattagcagttatttagcctggtatcagcaaaaaccagggaaagcccctaagctcctgatctatgctgcatccactttgcaaagtggggtcccatcaaggttcagcggcagtggatctgggacagaattcactctcacaatcagcagcctgcagcctgaagattttgcaacttattactgtcaactccttaatagttaccctccggggactttcggccctgggaccaaagtggatatcaaac

SEQ ID NO: 8398 - DNA, 322 bp, Homo sapiens
gacatccaggtgacccagtctccttccaccctgtctgcatctgtaggagacaaagtcaccatcacttgccgggccagtcacagtattagtagctggttggcctggtatcagcagaaaccagggaaagcccctaagctcctgatctataaggcgtctaatttagaaaatggggtcccatcaaggttcagcggcagtggatctgggacagaattcactctcaccatcagcagcctgcagcctgatgattttgcaacttattactgccaacagtataatacttatttattcactttcggccctgggaccaaagtggatatcaaac

SEQ ID NO: 8399 - DNA, 331 bp, Homo sapiens
cagtctgccctgactcagcctcgctcagtgtccgggtctcctggacagtcagtcaccatctcctgcactggaaccagcagtgatgttggtggttataactatgtctcctggtaccaacagcacccaggcaaagcccccaaactcatgatttatgatgtcagtaagcggccctcaggggtccctgatcgcttctctggctccaagtctggcaacacggcctccctgaccatctctgggctccaggctgaggatgaggctgattattactgctgctcatatgcaggcagctacagtattgtcttcggaactgggaccaaggtcaccgtcctag

SEQ ID NO: 8400 - DNA, 337 bp, Homo sapiens
gaggttgtgatgactcagtctccactctccctgcccgtcagccttggacagccggcctccatctcctgcaggtctagtcaaagcctcgtgtacagtgatggaaacacctacctgaattggtttcagcagaggccaggccaatctccaaggcgcctaatttataaggtttctacccgggactctggggtcccagacagattcagcggcagtgggtcaggcactgagttcacactgaagatcagcagggtggaggctgaggatgttggggtttattactgcatgcaaggtacacactggccgctcactttcggcggagggaccaaggtggagatcaaac

SEQ ID NO: 8401 - DNA, 328 bp, Homo sapiens; identical to SEQ ID NO: 5976

SEQ ID NO: 8402 - DNA, 340 bp, Homo sapiens; identical to SEQ ID NO: 3951

SEQ ID NO: 8403 - DNA, 328 bp, Homo sapiens
caggctgtggtgactcaggagccctcactgactgtgtccccaggagggacagtcactctcacctgtggctccagcactggagctgtcaccagtggtcattatccctactggttccagcagaagcctggccaagcccccaggacactgatttatgatacaaccaacaaacactcctggacacctgcccggttctcaggctccctccttgggggcaaagctgccctgaccctttcgggtgcgcagcctgaggatgaggctgagtattactgcttgctctcctatactggtgccgtggtattcggcggagggaccaagctgaccgtcctag

SEQ ID NO: 8404 - DNA, 328 bp, Homo sapiens
cagtctgccctgactcagcctcgctcagtgtccgggtctcctggacagtcagtcaccatctcctgcactggaaccagcagtgatgttggtggttataactatgtctcctggtaccaacagcacccaggcaaagcccccaaactcatgatttatgatgtcagtaagcggccctcaggggtccctgatcgcttctctggctccaagtctggcaacacggcctccctgaccatctctgggctccaggctgaggatgaggctgattattactgctgctcatatgcaggcagctcttatgtcttcggaactgggaccaaggtcaccgtcctag

SEQ ID NO: 8405 - DNA, 322 bp, Homo sapiens
gacatccagatgacccagtctccttccaccctgtctgcatctgtaggagacagagtcaccatcacttgccgggccagtcagagtattaatagctggttggcctggtatcagcagaaaccagggaaagcccctaagctcctgatctatagggcgtctagtttagaaagtggggtcccatcaaggttcaccggcagtggatctgcgacagaattcactctcaccatcagcagcctgcagcctgatgattttgcaacttattactgccaacagtataatagttttccctggacgttcggccaagggaccaacgtggaaatcaaac

SEQ ID NO: 8406 - DNA, 329 bp, Homo sapiens
cagtctgccctgactcagcctcgctcagtgtccgggtctcctggacagtcagtcaccatctcctgcactggaaccagcagtgatgttggtggttatgactatgtctcctggtatcaacaacacccaggcaaagcccccaaactcatcatttatgatgtcagtaagtggccctcaggggtccctgatcgcttctctggctccaagtctggcagcacggcctccctgattatctctgggctccaggctgaggatgaggctgattattactgctgctcatatgcaggcggcgacacttttgtcttcggaactgggaccaaggtcaccgtcct

SEQ ID NO: 8407 - DNA, 322 bp, Homo sapiens
gaaattgtgttgacacagtctccagccaccctgtctttgtctccaggggaaagagccaccctcttctgcagggccagtcagagtgttagcagccagttagcctggtaccaacagaaacctggccaggctcccaggctcctcatctatgatgcatccaacagggccaccggcatcccagtcaggttcagtggcagtgggtctgggacagacttcactctcaccatcagcagcctagagcctgaagattttgcagtttattactgtcagcagtgtggcaactggcctttcactttcggccctgggaccaaagtggatatcaaac

SEQ ID NO: 8408 - DNA, 331 bp, Homo sapiens; identical to SEQ ID NO: 1021

SEQ ID NO: 8409 - DNA, 325 bp, Homo sapiens
gacatccagttgacccagtctccatccttcctgtctgcatctgtaggagacagagtcaccatcacttgccgggccagtcagggcattagcaattatttagcctggtatcagcaaaaaccagggaaagcccctaagctcctgatctatgctgcatccactttgcaaagtggggtcccatcaaggttcagcggcagtggatctgggacagaattcactctcacaatcagcagcctgcagcctgaagattttgcaacttattactgtcaacagcttaatagttaccctggtttcactttcggccctgggaccaaagtggatatcaaac

SEQ ID NO: 8410 - DNA, 325 bp, Homo sapiens
gacatccagttgacccagtctccatccttcctgtctgcatctgtaggagacagagtcaccatcacttgccgggccagtcagggcattagcagttatttagcctggtatcagcaaaaaccagggaaagcccctaagctcctgatctatgctgcatccactttgcaaagtggggtcccatcaaggttcagcggcagtggatctgggacagaattcactctcacaatcagcagcctgcagcctgaagattttgcaacttattactgtcaacagcttaatagttaccctggattcactttcggccctgggaccaaagtggatatcaaac

SEQ ID NO: 8411 - DNA, 322 bp, Homo sapiens
gacatccagttgacccagtctccatccttcctgtctgcatctgtaggagacagagtcaccatcacttgccgggccagtcagggcattagcagttctttagcctggtatcaccaaaaaccagggaaagccccaaagctcctgatctatgctgcatccactttgcaaagtggggtcccatcaaggttcagcggcagtggatctgggacagacttcactctcacaatcagcagcctgcagcctgaagattttgcaacttattactgtcaacagcttaatagttacaacaagacgttcggccaagggaccaaggtggaaatcaaac

SEQ ID NO: 8412 - DNA, 331 bp, Homo sapiens
cagtctgccctgactcagcctgcctccgtgtctgggtctcctggacagtcgatcaccatctcctgcactggaaccagcagtgatgttgggagttataaccttgtctcctggtaccaacaacacccaggcgaagcccccaaactcatgatttatgaggtcagtaagcggccctcaggggtttctaatcgcttctctggctccaagtctggcaacacggcctccctgacaatctctgggctccaggctgaggacgaggctgattatcactgctgctcatatgcaggttttagcacttggatgttcggcggagggaccaagctgaccgtcctag

SEQ ID NO: 8413 - DNA, 348 bp, Homo sapiens
cagcctgtgctgactcagccaccttcctcctccgcatctcctggagaatccgccagactcacctgcaccttgcccagtgacatcactgttggtaggtacaacatatactggtaccagcagaagccagggagccctcccaggtatctcctatacttctactcagactcagataagggccagggctctggagtccccagccgcttctctggatccaaagatgcttcagccaatacagggattttactcatctccgggctccagtctgaggatgaggctgactattactgtatgatttggccaaccaatgcttctaggtattcggcggagggaccaagctgaccgtcctag

SEQ ID NO: 8414 - DNA, 322 bp, Homo sapiens
gacatccagatgacccagtctccatcctccctgtctgcatctgtaggagacagagtcaccatcacttgccaggcgagtcaagacattaggaagtatttaaattggtatcagcagaaaccagggaaagcccctaaactcctgatctacgatgcatccaatttggaaacaggggtcccatcaaggttcagtggaagtggatctgggacagattttactttcaccatcagcagcctgcagcctgaagatattgcaacatattactgtcaacagtatgataatctcccgatcaccttcggccaagggacacgactggagattaaac

SEQ ID NO: 8415 - DNA, 325 bp, Homo sapiens; identical to SEQ ID NO: 4709

SEQ ID NO: 8416 - DNA, 331 bp, Homo sapiens; identical to SEQ ID NO: 3332

SEQ ID NO: 8417 - DNA, 337 bp, Homo sapiens
gacatcgtgatgacccagtctccagactccctggctgtgtctctgggcgagagggccaccatcaactgcaagtccagccagagtattttatacagccccaacgataagaactacttagcttggtaccagcagaaaccaggacagcctcctaagctgctcatttactgggcatctacccgggaatccggggtccctgaccgattcagtggcagcgggtctgggacagatttcactctcaccatcagcagcctgcaggctgaagatgtggcagtttattactgtcagcaatattatagtactcggacgttcggccaagggaccagggtggaaatcaaac

SEQ ID NO: 8418 - DNA, 319 bp, Homo sapiens; identical to SEQ ID NO: 7651

SEQ ID NO: 8419 - DNA, 319 bp, Homo sapiens
gacatccagatgacccagtctccatcctccctgtctgcatctgtaggagacagagtcaccatcacttgccgggcaagtcagagcattagcagcaatttaaattggtatcagcagaaaccagggaaagcccctaagctcttgatctatgctgcatccagtttgcaaagtggggtcccatcaaggttcagtggcagtggatctgggacagacttcactctcaccatcagcagtctgcaacctgaagattttgcaacttactactgtcaacagagttacagtaaccctacttttggccaggggaccaagctggagatcaaac

SEQ ID NO: 8420 - DNA, 340 bp, Homo sapiens
gatattgtgatgacccagactccactctccctgcccgtcacccctggagagccggcctccatctcctgcaggtctagtcagagcctcttggatagtgataatggaaacacctatttggactggttcctgcagaagccagggcagtctccacagctcctgatctattcgctttcttatcgggcctctggagtcccagacaggttcagtggcagtgggtcaggcactgagttcacactgaaaatcagcagagtggaggctgaggatattggagtctattactgcatgcaacgtatggtgtttccgaggacgttcggccaagggaccaaggtggaaatcaaac

SEQ ID NO: 8421 - DNA, 322 bp, Homo sapiens
gacatccagatgacccagtctccatcctccctgtctgcatctgtaggagacagagtcaccatcacttgccgggcaagtcagagcattagcagctatttaaattggtatcagcagaaaccagggaaagcccctaagctcctgatctctgctgcatccagtttgcaaagtggggtcccatcaaggttcagtggcagtggatctgggacagatttcactctcaccatcagcagtctgcaacctgaagattttgcaacttactactgtcaacagagttacagtaccccgctcactttcggcggagggaccaaggtggagatcaaac

SEQ ID NO: 8422 - DNA, 322 bp, Homo sapiens; identical to SEQ ID NO: 1798

SEQ ID NO: 8423 - DNA, 325 bp, Homo sapiens
gacatccagatgacccagtctccttccaccctgtctgcatctgtaggagacagagtcaccatcacttgccgggccagtcagagtattagtagctggttggcctggtatcagcagaaaccagggagagcccctaaactcctgatctataaggcgtctagtttagaaagtggggtcccatcaaggttcagcggcagtggatctgggacagaattcactctcaccatcagcagcctgcagcctgatgattttgcgacttattactgccaacagtataatagttattttacgtggacgtttggccaagggaccaaggtggaaatcaaac

SEQ ID NO: 8424 - DNA, 334 bp, Homo sapiens
cagtctgccctgactcagcctgcctccgtgtctgggtctcctggacagtcgatcaccatctcctgcactggaaccagcagtgacgttggtggttataactatgtctcctggtaccaacaacacccaggcaaaccccccaaactcatgatttatgatgtcagtaatcggccctcaggggtttctaatcgcttctctggctccaagtctggcaacacggcctccctgaccatctctgggctccaggctgaggacgaggctgattattactgcagctcatatacaagcagcaccactccctatgtcttcggaactgggaccaaggtcaccgtcctag

SEQ ID NO: 8425 - DNA, 328 bp, Homo sapiens
gaaattgtgttgacgcagtctccaggcaccctgtctttgtctccaggggaaagagccaccctctcctgcagggccagtcagagtgttagcagcagctacttagcctggtaccagcagaaacctggccaggctcccaggctcctcatctatggtgcatccagcagggccactggcatcccagacaggttcagtggcagtgggtctgggacagacttcactctcaccatcagcagactggagcctgaagattttgcagtgtattactgtcagcagtatggtagctcacctcggtggacgttcggccaagggaccaaggtggaaatcaaac

SEQ ID NO: 8426 - DNA, 328 bp, Homo sapiens
cagtctgccctgactcagcctgcctccgtgtctgggtctcctggacagtcgatcaccatctcctgcactggaaccagcagtgacgttggtggttataactatgtctcctggtaccaacaacacccaggcaaagcccccaaactcgtgatttatgatgtcagtaatcggccctcaggggtttctaatcgcttctctggctccaagtctggcaacacggcctccctgaccatctctgggctccaggctgaggacgaggctgattattactgcagctcatatacaagcagcagcactctcttcggcggagggaccaagctgaccgtcctag

SEQ ID NO: 8427 - DNA, 325 bp, Homo sapiens
gacatccagatgacccagtctccttccaccctgtctgcatctgtaggagacagagtcaccatcacttgccgggccagtcagagtattagtagctggttggcctggtatcagcagaaaccagggaaagcccctaagctcctgatctataaggcgtctagtttagaaagtggggtcccatcaaggttcagcggcagtggatctgggacagaattcactctcaccatcagcagcctgcagcctgatgattttgcaacttattactgccaacagtataatagttattcagagtggacgttcggccaagggaccaaggtggaaatcaaac

SEQ ID NO: 8428 - DNA, 328 bp, Homo sapiens
gaaattgtgttgacacagtctccagccaccctgtctttgtctccaggggaaagagccaccctctcctgcagggccagtcagagtgttagcagctacttagcctggtaccaacagaagcctggccaggctcccaggctcctcatctatgatgcatccaacagggccactgacatcccagccaggttcagtggcagtgggtctgggacagacttcactctcaccatcagcagcctagagcctgaagattttgcagtctattactgtcagcagcgtagcaactggcctccgagggtcactttcggcggagggaccaaggtggagatcaaac

SEQ ID NO: 8429 - DNA, 325 bp, Homo sapiens
gaaattgtgttgacgcagtctccaggcaccctgtctttgtctccaggggaaagagccaccctctcctgcagggccagtcagagtgttagcagcagctacttagcctggtaccagcagaaacctggccaggctcccaggctcctcatctatggtgcatccagcagggccactggcatcccagacaggttcagtggcagtgggtctgggacagacttcactctcaccatcagcagactggagcctgaagattttgcagtgtattactgtcagcagtatggtagctcaccttggacgttcggccaagggaccaaggtggaaatcaaac

SEQ ID NO: 8430 - DNA, 328 bp, Homo sapiens
tcctatgagctgacacagccaccctcggtgtcagtgtccccaggacagacggccaggatcacctgctctggagatgcattgccaaagcaatatgcttattggtaccagcagaagccaggccaggcccctgtgctggtgatatataaagacagtgagaggccctcagggatccctgagcgattctctggctccagctcagggacaacagtcacgttgaccatcagtggagtccaggcagaagatgaggctgactattactgtcaatcagcagacagcagtggtacttataatgtggtattcggcggagggaccaagctgaccgtcctag

SEQ ID NO: 8431 - DNA, 316 bp, Homo sapiens
tcctatgtgctgactcagccaccctcggtgtcagtggccccaggacagacggccaggatttcctgtgggggaaacagcattggaagtaaaagtgttcactggtaccagcagaagccaggccaggcccctgtgctggtcgtctatgatgatagcgaccggccctcagggatccctgagcgattctctggctccaactctgggaacacggccaccctgaccatcagcagggtcgaagccggggatgaggccgactatttctgtcaggtgtgggatactagaggggtgttcggcggagggaccaagctgaccgtcctag

SEQ ID NO: 8432 - DNA, 331 bp, Homo sapiens
caggctgtgctgactcagcctccctcagcgtctgggacccccgggcagagggtcaccatctcttgttctggagccacctccaacatcggaagtaattatgtatattggtaccagcaactcccaggaacggcccccaaactcctcatctatcggaataattaccggccctcaggggtccctgaccgattctctggctccaagtctggcacctcagcctccctggccatcagtgggctccgggccgaggatgaggctgattattactgtgcagcatgggatgacagcctgagtggtgtggttttcggcggagggaccgagctgaccgtcctag

SEQ ID NO: 8433 - DNA, 322 bp, Homo sapiens
gaaattgtgttgacacagtctccagccaccctgtctttgtctccaggggaaagagccaccctctcctgcagggccagtcagagtgttagcagctacttagcctggtaccaacagaaacctggccaggctcccaggctcctcatctatgatgcatccaacagggccactggcatcccagccaggttcagtggcagtgggtctgggacagacttcactctcaccatcagcagcctagagcctgaagattttgcagtttattactgtcagcagcgtagcaactggcctcgggctttcggccctgggaccaaagtggatatcaaac

SEQ ID NO: 8434 - DNA, 331 bp, Homo sapiens
cagtctgtgttgacgcagccgccctcagtgtctgcggccccaggacagaaggtcaccatctcctgctctggaagcaactccaacattgggaataattatgtatcctggtaccagcacctcccaggaacagcccccaaactcctcatttatgacaatgataagcgaccttcagggattcctgaccgattctctggctccaagtctggcacgtcagccaccctgggcatcaccggactccagactggggacgaggccgattattactgcggaacatgggatagcagcctgagtgcaggagtattcggcggagggaccaagctgaccgtcctag

SEQ ID NO: 8435 - DNA, 322 bp, Homo sapiens
gacatccagatgacccagtctccttccaccctgtctgcatctgtaggagacagagtcaccatcacttgccgggccagtcagagtattagtagttggttggcctggtatcagcagaaaccagggaaagcccctaagctcctgatctataaggcgtctagtttagaaagtggggtcccatcaaggttcagcggcagtggatctgggacagaattcactctcaccatcagcagcctgcagcctgatgattttgcaacttattactgccaacagtataatagttactcgtacacttttggccaggggaccaagctggagatcaaac

SEQ ID NO: 8436 - DNA, 346 bp, Homo sapiens
cagcctgtgctgactcagccaacttccctctcagcatctcctggagcatcagccagactcacctgcaccttgcgcagtggcatcaatcttggtagctacaggatattctggtaccagcagaagccagagagccctccccggtatctcctgagctactactcagactcaagtaagcatcagggctctggagtccccagccgcttctctggatccaaagatgcttcgagcaatgcagggattttagtcatctctgggctccagtctgaggatgaggctgactattactgtatgatttggcacagcagtgcttcggtgttcggcggagggaccaagctgaccgtcctag

SEQ ID NO: 8437 - DNA, 322 bp, Homo sapiens
gaaagtgtgttgacgcagtctccaggcaccctgtctttgtctccaggggaaagagccaccctctcctgcagggccagtcagagtgttagcagcagctacttagcctggtaccagcagaaacctggccaggctcccaggctcctcatctatggtgcatccagcagggccacaggcatcccagacaggttcagtggcagtgggtctgggacagacttcactctcaccatcagcagactggagcctgaagattttgcagtgtattactgtcagcagtatggtagctcagggacgttcggccaagggaccaaggtggaaatcaaac

SEQ ID NO: 8438 - DNA, 322 bp, Homo sapiens
gaaatagtgatgacgcagtctccagccaccctgtctgtgtctccaggggaaagagccaccctctcctgcagggccagtcagagtgttagcagcaacttagcctggtaccagcagaaacctggccaggctcccaggctcctcatctatggtgcatccaccagggccactggtatcccagccaggttcagtggcagtgggtctgggacagagttcactctcaccatcagcagcctgcagtctgaagattttgcagtttattactgtcagcagtataataactggtccaggacgttcggccaagggaccaaggtggaaatcaaac

SEQ ID NO: 8439 - DNA, 325 bp, Homo sapiens
gacatccagatgacccagtctccatcctccctgtctgcatctgtaggagacagagtcaccatcacttgccgggcaagtcagagcattaggaactatttaaattggtatcagcagaaacccgggaaagcccctaagctcctgatctatgatgcatccagtttgcaaagtggggtcccatcaaggttcagtggcagtggatctgggacagatttcactctcaccatcagcagtctgcaacctgaagattttgcaacttactactgtcaacagagttacagtaccccttcgtggacgttcggccaagggaccaaggtggaaatcaaac

SEQ ID NO: 8440 - DNA, 316 bp, Homo sapiens
gacatccagatgacccagtctccatcttccgtgtctgcatctgtaggagacagagtcaccatcacttgtcgggcgagtcagggtattagcagctggttagcctggtatcagcagaaaccagggaaagcccctaagctcctgatctatgctgcatccagtttgcaaagtggggtcccatcaaggttcagcggcagtggatctgggacagatttcactctcaccatcagcagcctgcagcctgaagattttgcaacttactattgtcaacaggctaacagtttctccttcggccaagggacacgactggagattaaac

SEQ ID NO: 8441 - DNA, 322 bp, Homo sapiens
gaaattgtgttgacgcagtctccaggcaccctgtctttgtctccaggggaaagagccaccctctcctgcagggccagtctgagtgttagcagcagctacttagcctggtaccagcagaaacctggccaggctcccaggctcctcatctatgctgcatccagcagggccactggcatcccagacaggttcagcggcagtgggtctgggacagacttcactctcaccatcagcagactggagcctgaagattttgcagtgtattactgtcagcagtatggtagctcattcgctttcggccctgggaccaaagtggatatcaaac

SEQ ID NO: 8442 - DNA, 331 bp, Homo sapiens
tcttctgagctgactcaggaccctgctgtgtctgtggccttgggacagacagtcaggatcacatgccaaggagacagcctcagaagctattatgcaagctggtaccagcagaagccaggacaggcccctgtacttgtcatctatggtaaaaacaaccggccctcagggatcccagaccgattctctggctccagctcaggaaacacagcttccttgaccatcactggggctcaggcggaagatgaggctgactattactgtaactcccgggacagcagtggtaaccatatgggtgtggtattcggcggagggaccaagctgaccgtcctag

SEQ ID NO: 8443 - DNA, 325 bp, Homo sapiens
gaaattgtgttgacacagtctccagccaccctgtctttgtctccaggggaaagagccaccctctcctgcagggccagtcagagtgttagcagctacttagcctggtaccaacagaaacctggccaggctcccaggctcctcatctatgatgcatccaacagggccactggcatcccagccaggttcattggcagtgggtctgggacagacttcactctcaccatcagcagcctagagcctgaagattttgcagtttatttctgtcagcaacgtagcacctggcctcccatcaccttcggccaagggacacggctggagattaaac

SEQ ID NO: 8444 - DNA, 331 bp, Homo sapiens
cagtctgccctgactcagcctgcctccgtgtctgggtctcctggacagtcgatcaccatctcctgcactggaaccagcagtgacgttggtggttatgactatgtctcctggttccaactccacccaggcaaagcccccaaactcatgatttatgatgtcactaatcggccctcaggggtttcttatcgcttctctggctccaagtctggcaacacggcctccctgaccatctctgggctccaggctgaggacgaggctgattattactgcagctcatatacacgcagcggcactcaagtcttcggaactgggaccaaggtcaccgtcctag

SEQ ID NO: 8445 - DNA, 340 bp, Homo sapiens
cagtctgccctgactcagcctgcctccgtgtctgggtctcctggacagtcgatcaccatctcctgcactggaaccagcagtgatgttgggagttataaccttgtctcctggtaccaacagcacccaggcaaagcccccaaactcatgatttatgaggtcagtaagcggccctcaggggtttctaatcgcttctctggctccaagtctggcaacacggcctccctgacaatctctgggctccaggctgaggacgaggctgattattactgctgctcatatgcaggtagtagcactcccttccttgtggtattcggcggagggaccaagctgaccgtcctag

SEQ ID NO: 8446 - DNA, 322 bp, Homo sapiens; identical to SEQ ID NO: 7802

SEQ ID NO: 8447 - DNA, 322 bp, Homo sapiens
gaaatagtgatgacgcagtctccagccaccctgtctgtgtctccaggggaaagagccaccctctcctgcagggccagtcagagtgttagcagtaacttagcctggtaccagcagaaacctggccaggctcccaggctcctcatctatggtgcatccaccagggccactggtatcccagccaggttcagtggcagtgggtctgggacagagttcactctcaccatcagcagcctgcagtctgaagattttgcagtttattactgtcagcagtattataactggctccgggcgttcggccaagggaccaaggtggaaatcaaac

SEQ ID NO: 8448 - DNA, 322 bp, Homo sapiens; identical to SEQ ID NO: 1641

SEQ ID NO: 8449 - DNA, 319 bp, Homo sapiens
gacattcagatgacccagtctccatcctccctgtctgcatctgtaggagacagagtcaccgtcacttgccgggcaagtcagagtattagcaactatttaaattggtatcagcagaaaccagggaaagcccctaagctcctgatctacgctgcatccagtttgcagagtggggtcccatctaggttcagtggcagtggatctgggacagatttcactctcaccatcagcagtctgcaacctgaagattttgcaacttactactgtcaacagagttacagtaccctcccttttggccaggggaccaaggtggagatcaaac

SEQ ID NO: 8450 - DNA, 330 bp, Homo sapiens
cagtctgtgctgactcagccaccctcagcgtctgggacccccgggcagagggtcaccatctcttgttctggaagcaactccaacatcggaagtaattatgtatactggtaccagcaggtcccaggaacggcccccaaactactcatctataggaacaatcagcggccctcaggggtccctgaccgattctctggctccaagtctggcacctcagcctccctggccatcagtgggctccggtccgaagatgaggctgattattattgtgcagcatgggatgacagcctgagtggttgggtgttcggcggagggaccaagcagaccgtccta

SEQ ID NO: 8451 - DNA, 319 bp, Homo sapiens
gacatccagatgacccagtctccttccaccctgtctgcatctgtaggagacagagtcaccatcacttgccgggccagtcagagtattagtagctggttggcctggtatcagcagaaaccagggaaagcccctaagctcctgatctataaggcgtctagtttagaaagtggggtcccatcaaggttcagcggcagtggatctgggacagaattcactctcaccatcagcagcctgcagcctgatgattttgcaacttattactgccaacagtataatagttatccgacgttcggccaagggaccaaggtggaaatcaaac

SEQ ID NO: 8452 - DNA, 331 bp, Homo sapiens
cagtctgccctgactcaacctgccgccgtgtctgcatctcctggacagtcgatcaccatcccctgcactggaaccagcagtgacgttggtgcttatgattatgtctactggtaccaacaacaccccggtagagcccccaaaatcataatttatgatgtccattatcggccctcaggggtttctaatcgcttctctggctccaagtctggcaacacggcctccctgaccatctctgggctccagactgaggacgaggctgattactactgcagctcatatacaaacagtaacactgcggtattcggcggagggaccaaggtgaccgtcctag

SEQ ID NO: 8453 - DNA, 331 bp, Homo sapiens
cagtctgccctgactcaacctgccgccgtgtctgcatctcctggacagtcgatcaccatcccctgcactggaaccagcagtgacgttggtacttataattatgtctactggtaccaacaacaccccggcaaagcccccaaaatcataatttatgatgttagtaatcggccctcaggggtttctaatcgcttctctggctccaagtctggcaacacggcctccctgaccatctctgggctccagactgaggacgagggtgattactactgcagctcatatacaagcagtaacactgtggtattcggcggagggaccaagctgaccgtcctag

SEQ ID NO: 8454 - DNA, 322 bp, Homo sapiens
gaaattgtgttgacgcagtctccaggcaccctgtctttgtctccaggggacagagccaccctctcctgcagggccagtcagagtgttagcagcagctacttagcctggtaccagcagagacctggccaggctcccaggctcctcatctatgatacatccagcagggccactggcatcccagacaggttcagtggcagtgggtctgggacagacttcactctcaccatcagcagactggagcctgaagattttgcagtgtattactgtcagcagtatggtagctctttcactttcggccctgggaccaaagtggatatcaaac

SEQ ID NO: 8455 - DNA, 331 bp, Homo sapiens
cagtctgtgctgactcagccaccctcagcgtctgggacccccgggcagagggtcaccatctcttgttctggaagcagctccaacatcggaagtaatgctctaaattggtaccagcagctcccaggaacggcccccaaactcctcatctatggtaataatcagcggccctcaggggtccctgaccgattctctggctccaagtctggcacctcagtttccctggccatcagtgggctccagtctgaggatgaggctgattattactgtgcagcatgggatgacagcctgaatggcgtggtattcggcggagggaccaagctgaccgtcctag

SEQ ID NO: 8456 - DNA, 328 bp, Homo sapiens
gaacttgtgttgacacagtctccagccaccctgtctttgtctccaggggaaagagccaccctctcctgcagggccagtcagagtgttagcagcttcttagcctggtaccaacagaaacctggccaggctcccaggctcctcatctatgatgcatccaacagggccactgacatcccagccaggttcagtggcagtgggtctgggacagacttcactctcaccatcagcagcctagagcctgaagattttgcagtttattactgtcagcagcgtagcaactggcctccgagggtcactttcggcggagggaccaaggtggagatcaaac

SEQ ID NO: 8457 - DNA, 340 bp, Homo sapiens
gacatcgtgatgacccagtctccagactccctggctgtgtctctgggcgagagggccaccatcaactgcaagtccagccagagtgttttctacagctccaacaataagaactacttagcttggtaccagcagaaaccaggacagcctcctaagctgctcatttactgggcatctacccgggaatccggggtccctgaccgattcagtggcagcgggtctgggacagatttcactctcaccatcagcagcctgcaggctgaagatgtggcagtttattactgtcagcaatattctagtactccgctcactttcggcggagggaccaaggtggagatcaaac

SEQ ID NO: 8458 - DNA, 331 bp, Homo sapiens
cagtctgtgttgacgcagccgccctcagtgtctgcggccccaggacagaaggtcaccatctcctgctctggaagcagctccaacattgggaataattatgtatcctggtaccagcagctcccaggaacagcccccaaactcctcatttatgacaattataagcgaccctcagggattcctgaccgattctctggctccaagtctggcacgtcagccaccctgggcatcaccggactccagactggggacgaggccgattattactgcggaacatgggatagcagcctgagtgctggtgtcttcggaactgggaccaaggtcaccgtcctag

SEQ ID NO: 8459 - DNA, 319 bp, Homo sapiens
gacatccagatgacccagtctccttccaccctgtctgcatctgtaggagacagagtcaccatcacttgccgggccagtcagagtattagtacctggttggcctggtatcagcagaaaccagggaaagcccctaaggtcctgatctatgaggcgtctagtttagaaagtggggtcccatcgaggttcagcggcagtggatctgggacagaattcactctcaccatcagcagcctgcagcctgatgattttgcaacttattactgccaacagtatgatagttattggacgttcggccaagggaccagggtggaaatcaaac

SEQ ID NO: 8460 - DNA, 337 bp, Homo sapiens
gatattgtgatgacccagactccactctcctcacctgtcacccttggacagccggcctccatctcctgcaggtctagtcaaagcctcgtacacagtgatggaaacacctacttgagttggcttcagcagaggccaggccagcctccaagactcctaatttataagatttctaaccggttctctggggtcccagacagattcagtggcagtggggcagggacagatttcacgctgaaaatcagcagggtggaagctgaggatgtcggactttattactgcatgcaagctacacaatttccgtacacttttggccaggggaccaagctggagatcaaac

SEQ ID NO: 8461 - DNA, 322 bp, Homo sapiens
gacatccagatgacccagtctccatcctccctgtctgcatctgtaggagacagagtcaccatcacttgccaggcgagtcaggacattagcaactatttaaattggtatcagcagaaaccagggaaagcccctaagctcctgatctacgatgcatccaatttggaaacaggggtcccatcaaggttcagtggaagtggatctgggacagattttactttcaccatcagcagcctgcagcctgaagatattgcaacatattactgtcaacagtatgataatctccctctcactttcggcggagggaccaaggtggagatcaaac

SEQ ID NO: 8462 - DNA, 322 bp, Homo sapiens
gacatccagatgacccagtctccatcctccctgtctgcatctgtaggagacagagtcaccatcacttgccaggcgagtcaggacattaataaatatttaaattggtatcagcagaaaccagggaaagcccctaagctcctgatctacgatgcatccaatttggaaacaggggtcccatcaaggttcagtggaagtggatctgggacagattttactttcaccatcagcagcctgcagcctgaagatattgcaacatattactgtcaacagtctgataatctcccttacacttttggccaggggaccaagctggagatcaaac

SEQ ID NO: 8463 - DNA, 322 bp, Homo sapiens
gacatccagatgacccagtctccatcctccctgtctgcatctgtaggagacagagtcaccatcacttgccaggcgagtcaggacattagcaactatttaaattggtatcagcataaaccagggaaagcccctaaactcctgatctacgatgcatccaatttggtaacaggggtcccatcaaggttcagtggaagtggatctgggacagattttactttcaccatcagcaccctgcagcctgaagatattgcaacatatttctgtcaacagtatgataatctccctccgacttttggccaggggaccaagctggagatcaaac

SEQ ID NO: 8464 - DNA, 325 bp, Homo sapiens
tcttctgagctgactcaggaccctgctgtgtctgtggccttgggacagacagtcaggatcacatgccaaggagacagcctcagaagctattatgcaagctggtaccagcagaagccaggacaggcccctgtacttgtcatctatggtaaaaacaaccggccctcagggatcccagaccgattctctggctccagctcaggaaacacagcttccttgaccatcactggggctcaggcggaagatgaggctgactattactgtaactcccgggacagcagtggtaaccattgggtgttcggcggagggaccaagctgaccgtcctag

SEQ ID NO: 8465 - DNA, 322 bp, Homo sapiens
gacacccagatgacccagtctccttccaccctgtctgcatctgtaggagacagagtcaccatcacttgccgggccagtcagagtattagtagttggttggcctggtatcagcagaaaccagggaaagcccctaagctcctgatctataaggcgtctagtttagaaagtggggtcccatcaaggttcagcggcagtggatctgggacagaattcactctcaccatcagcagcctgcggcctgatgattttgcaacttattactgccaacaatataatagttatccgctcactttcggcggagggaccaaggtggagatcaaac

SEQ ID NO: 8466 - DNA, 334 bp, Homo sapiens
cagtctgtgctgacgcagccgccctcagtgtctggggccccagggcagagggtcaccatgttctgcactgggagcagctccaacatcggggcagattatggtgtacactggtaccagcagcttccaggaacagcccccaagctcctcatctatggtaacagcaatcggccttcaggggtccctgaccgattctctggctccaagtctggcacctcagcctccctggccatcactgggctccaggctgaggatgaggctgattattactgccagtcgtatgacagcagcctgagttgttgggtgttcggcggagggaccaagctgaccgtcctag

SEQ ID NO: 8467 - DNA, 322 bp, Homo sapiens
gacatccagatgacccagtctccatcctccctgtctgcatctgtaggagacagagtcaccatcacttgccaggcgagtcaggacattagcaactatttaaattggtatcagcagaaaccagggaaagcccctaagctcctgatctacgatgcatccaatttggaaacaggggtcccatcaaggttcagtggaagtggatctgggacagattttactttcaccatcagcagcctgcagcctgaagatattgcaacatattactgtcaacagtatgataatctcccaatcaccttcggccaagggacacgactggagattaaac

SEQ ID NO: 8468 - DNA, 330 bp, Homo sapiens
attttatgctgactcagccccactctgtgtcggagtctccggggaagacggtaaccatctcctgcacccgcagcagtggcagcattgccatcaactatgtgcagtggtaccagcagcgcccgggcagttcccccactactgtgatctatgaggataaccaaagaccctctggggtccctgatcggttctctggctccatcgacagctcctccaactctgcctccctcaccatctctggactgaagactgaggacgaggctgactactactgtcagtcttatgatagcggcgatgtggtattcggcggagggaccaagctgaccgtcctag

SEQ ID NO: 8469 - DNA, 325 bp, Homo sapiens
gaaatagtgatgacgcagtctccagccaccctgtctgtgtctccaggggaaagagccaccctctcctgcagggccagtcagagtgttaggagcaacttagcctggtaccagcagaaacctggccaggctcccaggctcctcatttatggtgcatcaaccagggccactggtatcccagccaggttcagtggcagtgggtctgggacagagttcactctcaccatcagcagcctgcagtctgaagattttgcagtttattactgtcagcactataataactggccttcgtggacgttcggccaagggaccacggtggaaatcaaac

SEQ ID NO: 8470 - DNA, 322 bp, Homo sapiens; identical to SEQ ID NO: 1779

SEQ ID NO: 8471 - DNA, 320 bp, Homo sapiens
tcctatgagttgactcagccaccctcagtgtccgtgtccccgggacagacagccagcatcacctgctctggagataaattgggggacaaatatgcttgctggtatcagcagaagccaggccagtcccctgtgctggtcatctatgaagataacaagcggccctcagggatccctgagcgattctctggctccacctctgggaacacagccactctgaccatcagcgggacccaggctatggatgaggctgactattactgtcaggcgtgggacagcaccactttttatgtcttcggaactgggaccagggtcaccgtcct

SEQ ID NO: 8472 - DNA, 322 bp, Homo sapiens
gaaattgtgctgactcagtcaccagactttcagtctgtgactccaaaggagaaagtcaccatcacctgccgggccagtcagagcattggtagtagcttacactggttccagcagaaaccagatcagtctccaaacctcctcatcaagtttgcttcgcagtctctctcaggggtcccctcgaggttcagtggcagtggatctgggacagatttcaccctcaccatcaatagcctggaagctgaagatgctgcaacgtattactgtcatcagagtagtagtttaccgaagacgttcggccaagggaccaaggtggaaatcaaac

SEQ ID NO: 8473 - DNA, 373 bp, Homo sapiens
caggtgcaactgaaggagtcgggcccaggactggtgaagccttcggagaccctgtccctcacctgcattgtctctcgtggctccagcagtaattactactggaactggatccggcagcccgccgggaagggactggagtggattgggcgtgtctatgccggtgggaccaccaactacaacccctccctcaagaatcgagttaccatgtcagtagacacgtccaagaatcagttctccctgaagctgacctctgtgaccgccgcggacacggccgtgtattactgtgcgagaggtcgttatactctcggatacagttatgaatatcattggttcgacccctggggccagggagccctggtcaccgtctcctcag

SEQ ID NO: 8474 - DNA, 373 bp, Homo sapiens
caggtgcaactgaaggagtcgggcccaggactggtgaagccttcggagaccctgtccctcacctgcattgtctctcgtggctccagcagtaattactactggagctggatccggcagcccgccgggaagggactggagtggattgggcgtgtctatgccggtgggaccaccaactacaacccctccctcaagaatcgagttaccatgtcagtagacacgtccaagaaccagatctccctgaagctgacctctgtgaccgccgcggacacggccgtgtattactgtgcgagaggtcgttatactctcggatacagttatgaatatcattggttcgacccctggggccagggagccctggtcaccgtctcctcag

SEQ ID NO: 8475 - DNA, 373 bp, Homo sapiens; identical to SEQ ID NO: 8473

SEQ ID NO: 8476 - DNA, 373 bp, Homo sapiens; identical to SEQ ID NO: 8473

SEQ ID NO: 8477 - DNA, 373 bp, Homo sapiens; identical to SEQ ID NO: 8473

SEQ ID NO: 8478 - DNA, 373 bp, Homo sapiens; identical to SEQ ID NO: 8473

SEQ ID NO: 8479 - DNA, 373 bp, Homo sapiens
caggtgcaactgaaggagtcgggcccaggactggtgaagccttcggagaccctgtccctcacctgcattgtctctcgtggctccagcagtaattactactggaactggatccggcagcccgccgggaagggactggagtggattgggcgtgtctatgccggtgggaccaccaactacaacccctccctcaagaatcgagttaccatgtcagtagacacgtccaagaatcagttctccctgaagctgacctctgtgaccgccgcggacacggccgtgtattactgtgcgagaggtcgttatactctcggatacagttatgaatatcattggttcgacccctggggccagggaaccctggtcaccgtctcctcag

SEQ ID NO: 8480 - DNA, 373 bp, Homo sapiens; identical to SEQ ID NO: 8473

SEQ ID NO: 8481 - DNA, 373 bp, Homo sapiens; identical to SEQ ID NO: 8473

SEQ ID NO: 8482 - DNA, 373 bp, Homo sapiens; identical to SEQ ID NO: 8473

SEQ ID NO: 8483 - DNA, 373 bp, Homo sapiens; identical to SEQ ID NO: 8473

SEQ ID NO: 8484 - DNA, 373 bp, Homo sapiens; identical to SEQ ID NO: 8473

SEQ ID NO: 8485 - DNA, 373 bp, Homo sapiens; identical to SEQ ID NO: 8473

SEQ ID NO: 8486 - DNA, 373 bp, Homo sapiens; identical to SEQ ID NO: 8473

SEQ ID NO: 8487 - DNA, 373 bp, Homo sapiens; identical to SEQ ID NO: 8473

SEQ ID NO: 8488 - DNA, 373 bp, Homo sapiens; identical to SEQ ID NO: 8479

SEQ ID NO: 8489 - DNA, 373 bp, Homo sapiens; identical to SEQ ID NO: 8473

SEQ ID NO: 8490 - DNA, 373 bp, Homo sapiens; identical to SEQ ID NO: 8473

SEQ ID NO: 8491 - DNA, 373 bp, Homo sapiens; identical to SEQ ID NO: 8474

SEQ ID NO: 8492 - DNA, 373 bp, Homo sapiens; identical to SEQ ID NO: 8473

SEQ ID NO: 8493 - DNA, 373 bp, Homo sapiens; identical to SEQ ID NO: 8474

SEQ ID NO: 8494 - DNA, 373 bp, Homo sapiens; identical to SEQ ID NO: 8473

SEQ ID NO: 8495 - DNA, 373 bp, Homo sapiens; identical to SEQ ID NO: 8473

SEQ ID NO: 8496 - DNA, 373 bp, Homo sapiens; identical to SEQ ID NO: 8473

SEQ ID NO: 8497 - DNA, 373 bp, Homo sapiens; identical to SEQ ID NO: 8474

SEQ ID NO: 8498 - DNA, 373 bp, Homo sapiens; identical to SEQ ID NO: 8479

SEQ ID NO: 8499 - DNA, 373 bp, Homo sapiens; identical to SEQ ID NO: 8473

SEQ ID NO: 8500 - DNA, 373 bp, Homo sapiens; identical to SEQ ID NO: 8479

SEQ ID NO: 8501 - DNA, 373 bp, Homo sapiens; identical to SEQ ID NO: 8473

SEQ ID NO: 8502 - DNA, 373 bp, Homo sapiens; identical to SEQ ID NO: 8479

SEQ ID NO: 8503 - DNA, 373 bp, Homo sapiens; identical to SEQ ID NO: 8473

SEQ ID NO: 8504 - DNA, 373 bp, Homo sapiens; identical to SEQ ID NO: 8473

SEQ ID NO: 8505 - DNA, 373 bp, Homo sapiens; identical to SEQ ID NO: 8474

SEQ ID NO: 8506 - DNA, 373 bp, Homo sapiens; identical to SEQ ID NO: 8473

SEQ ID NO: 8507 - DNA, 373 bp, Homo sapiens; identical to SEQ ID NO: 8473

SEQ ID NO: 8508 - DNA, 373 bp, Homo sapiens; identical to SEQ ID NO: 8473

SEQ ID NO: 8509 - DNA, 373 bp, Homo sapiens; identical to SEQ ID NO: 8473

SEQ ID NO: 8510 - DNA, 373 bp, Homo sapiens; identical to SEQ ID NO: 8473

SEQ ID NO: 8511 - DNA, 373 bp, Homo sapiens; identical to SEQ ID NO: 8473

SEQ ID NO: 8512 - DNA, 373 bp, Homo sapiens; identical to SEQ ID NO: 8473

SEQ ID NO: 8513 - DNA, 373 bp, Homo sapiens; identical to SEQ ID NO: 8473

SEQ ID NO: 8514 - DNA, 373 bp, Homo sapiens; identical to SEQ ID NO: 8473

SEQ ID NO: 8515 - DNA, 373 bp, Homo sapiens; identical to SEQ ID NO: 8473

SEQ ID NO: 8516 - DNA, 373 bp, Homo sapiens; identical to SEQ ID NO: 8473

SEQ ID NO: 8517 - DNA, 373 bp, Homo sapiens; identical to SEQ ID NO: 8473

SEQ ID NO: 8518 - DNA, 373 bp, Homo sapiens; identical to SEQ ID NO: 8473

SEQ ID NO: 8519 - DNA, 373 bp, Homo sapiens; identical to SEQ ID NO: 8473

SEQ ID NO: 8520 - DNA, 373 bp, Homo sapiens; identical to SEQ ID NO: 8474

SEQ ID NO: 8521 - DNA, 373 bp, Homo sapiens; identical to SEQ ID NO: 8479

SEQ ID NO: 8522 - DNA, 376 bp, Homo sapiens
caggtgcagctggtgcagtctggggctgaggtgaagaagcctggggcctcactgaaggtctcctgcaaggcttctggatacaccttcaccgcctactttgtgcactgggtgcgacaggcccctggacaagggcttgagtggctgggatggatcaaccctaacagtggtggcacaaactatgcacagaaggttcagggcagggtcaccatgaccagggacacgtccatcagcacagtctacatggagttgagcaggctgacatctgacgacacggccgtgtattactgtgcgagagatgggccttcggggacttattatttcgcctccgggggagaggacttctggggccagggaaccctggtcaccgtctcctcag

SEQ ID NO: 8523 - DNA, 376 bp, Homo sapiens
caggtgcagctggtgcagtctggggctgaggtgaagaagcctggggcctcactgaaggtctcctgcaaggcttctggatacatcttcaccggctactatgttcactgggtgcgacaggcccctggacaaggactcgagtggatggggtggatcaaccctaacagtggtggcacaaactatgcacagacgtttcagggcagggtcaccatgaccagggacacgtccatcaccacagtctacatggagctcagcaggctgagatctgacgacacggccgtgtattattgtgcgagagatgggccttcggggactcattatttcgcctccgggggggatgactactggggccagggaaccctgctcaccgtctcctcag

SEQ ID NO: 8524 - DNA, 376 bp, Homo sapiens
caggtgcagctggtgcagtctggggctgaggtgaagaagcctggggcctcactgaaggtctcctgtaaggcttctggatacaccttcaccggctactatgtgcactgggtgcgacaggcccctggacaagggcttgagtggatgggatggatcaaccctaacagtggtggcacaaactatgcacagaagtttcagggcagggtcaccatgaccagggacacgtccatcaccacagtctacatggagctgagcaggctgagatctgacgacacggccgtgtattactgtgcgagagatgggccttcggggactaattatttcgcctccgggggagaggactactggggccagggaaccccactcaccgtctcctcag

SEQ ID NO: 8525 - DNA, 376 bp, Homo sapiens
caggtgcagctggtgcagtctggggctgaggtgaagaagcctggggcctcactgaaggtctcctgcaaggcttctggatacaccttcaccggctactatgtgcactgggtgcgacaggcccctggacaagggcttgagtggatgggatggatcaaccctaacagtggtggcacaaactatgcacagaagtttcagggcagggtcaccatgaccagggacacgtccatcagcacagcctacatggagctgagcaggctgagatctgacgacacggccgtgtattactgtgcgagagatgggccttcggggacttattatttcgcctccgggggagaggactactggggccagggaaccctgctcaccgtctcctcag

SEQ ID NO: 8526 - DNA, 376 bp, Homo sapiens; identical to SEQ ID NO: 8525

SEQ ID NO: 8527 - DNA, 376 bp, Homo sapiens
caggtgcagctggtgcagtctggggctgaggtgaagaagcctggggcctcactgaaggtctcctgcaaggcttctggatacaccttcaccgcctactatgtgcactgggtgcgacaggcccctggacaagggcttgagtggatgggatggatcaaccctaacagtggtggcacaaactatgcacagaagtttcagggcagggtcaccatgaccagggacacgtccatcagcacagtctacatggagctgagtaggctgagatctgacgacacggccgtgtattactgtgcgcgagatgggccttcggggacttattatttcgcctccgggggagaggactactggggccagggaaccctgctcaccgtctcctcag

SEQ ID NO: 8528 - DNA, 376 bp, Homo sapiens
caggtgcagctggtgcagtctggggctgaggtgaagaagcctggggcctcactgaaagtctcctgcaaggcttctggatacaccttcaccggctactatatacactgggtgcgacaggcccctggacaagggcttgagtggatggggtggatcaaccctatcagtggtggcacaaactgtgcacagaagtttcaggacagggtcaccatgaccagggacacgtccatcaccacagcctacatggagctgagcaggctgagatctgacgacacggccgtgtattactgtgcgagagatgggccttcggggacttattatttcgcctccgggggagaggactactggggccagggaaccctgctcaccgtctcctcag

SEQ ID NO: 8529 - DNA, 376 bp, Homo sapiens; identical to SEQ ID NO: 8525

SEQ ID NO: 8530 - DNA, 376 bp, Homo sapiens; identical to SEQ ID NO: 8525

SEQ ID NO: 8531 - DNA, 376 bp, Homo sapiens
caggtgcagctggtgcagtctggggctgaggtgaagaagcctggggcctcactgaaggtctcctgcaaggcttctggatacaccttcaccggctactttgtgcactgggtgcgacaggcccctggacaagggcttgagtggatgggatggatcaaccctaacagtggtggcacaaactatgcagagaagtttcagggcagggtcaccctgaccagggacacgtccatcaccacagcctacatggagctgagcaggctgacatctgacgacacggccgtgtattactgtgcgagagatgggccttcggggacttattatttcgcctccgggggagaggactactggggccagggaaccctgctcaccgtctcctcag

SEQ ID NO: 8532 - DNA, 376 bp, Homo sapiens; identical to SEQ ID NO: 8525

SEQ ID NO: 8533 - DNA, 376 bp, Homo sapiens; identical to SEQ ID NO: 8525

SEQ ID NO: 8534 - DNA, 376 bp, Homo sapiens; identical to SEQ ID NO: 8525

SEQ ID NO: 8535 - DNA, 376 bp, Homo sapiens; identical to SEQ ID NO: 8525

SEQ ID NO: 8536 - DNA, 376 bp, Homo sapiens; identical to SEQ ID NO: 8525

SEQ ID NO: 8537 - DNA, 376 bp, Homo sapiens
caggtgcagctggtgcagtctggggctgaggtgaagaagcctggggcctcactgaaggtctcctgcaaggcttcaggatacaccttcaccggcttctatgtgcactgggtgcgacaggcccctggacaagggcttgagtggatgggatggatcaaccctatcagtggtggcacaaactatgcacagaagtttcagggcagggtcaccctgaccagggacacgtccatcagcacagtgtacttggagctgagcagactgacatctgacgacacggccgtgtattactgtgcgagagatgggccttcggggacttattatttcgcctccgggggagaggactactggggccagggaaccctgctcaccgtctcctcag

SEQ ID NO: 8538 - DNA, 376 bp, Homo sapiens
caggtgcagctggtgcagtctggggctgaggtgaagaagcctggggcctcactgaaggtctcctgcaaggcttctggatacaccttcaccgcctactatgtgcactgggtgcgacaggcccctggacaagggcttgagtggatgggatggatcaaccctaacagtggtggcacaaactatgcacagaagtttcagggcagggtcaccatgactagggacacgtccaccagcacagtctacatggagctgagcaggctgagatctgacgacacggccgtgtattactgtgcgagagatgggccttcggggactcattatttcgcctccgggggagaggactactggggccagggaaccctgctcaccgtctcctcag

SEQ ID NO: 8539 - DNA, 376 bp, Homo sapiens
caggtgcagctggtgcagtctggggctgaggtgaagaagcctggggcctcactgaaggtctcctgcaaggcttctggatacaccttcaccggctactatgtacactgggtgcgacaggcccctggacaagggcttgagtggatgggatggatcaaccctaacagtggtggcacaaactatgcacagaagtttcagggcagggtcaccatgaccagggacacggccatcaggacagtctacatggacctgaacaggctgagatctgacgactcggccgtgtattactgtgcgagagatgggccttcggggactcattatttcgcctccgggggagaggactactggggccagggaaccctgctcaccgtctcctcag

SEQ ID NO: 8540 - DNA, 376 bp, Homo sapiens
caggtgcagctggtgcagtctggggctgaggtgaagaagcctggggcctcactgaaggtctcctgcaaggcttctggatacaccttcaccggctattatgtgcactgggtgcgacaggcccctggacgagggcttgagtggatggggtgggtcaaccctaacagtggtggcacaaactatgcacagaagtttcagggcagggtcaccatgaccagggacacgtccatcaccacagtctatatggagctgagcaggctgagatctgacgacacggccatgtattactgtgcgagagatgggccttcggggactcattatttcgcctccgggggagaggactactggggccagggaaccctgctcaccgtctcctcag

SEQ ID NO: 8541 - DNA, 376 bp, Homo sapiens
caggtgcaactggtgcagtctggggctgaggtgaagaagcctggggcctcactgaaggtctcctgcaaggcttctggatacaccttcaccggctactatgtgcactgggtgcgacaggtccctggacaagggcttgagtggatggggtggatcaaccctaacagtggtgccacaaactatgcacagaagtttcagggcagggtcaccatgaccagggacacgtccatcaccacatcctacatggagctgagcaggctgaattctgacgacacggccgtgtattactgtgcgagagatgggccttcggggactcattatttcgcctccgggggagaggactactggggccagggaaccctgctcaccgtctcctcag

SEQ ID NO: 8542 - DNA, 376 bp, Homo sapiens
caggtgcagctggtgcagtctggggctgaggtgaagaagcctggggcctcactgaaggtttcctgcaaggcttctggatacaccttcaccggctactatgtgcactgggtgcgacaggcccctggacaagggcttgagtggatgggatggatcaaccctaacagtggtggcacaaactatgcacagaagtttcagggcagggtcaccgtgaccagggacacgtccatcaccacagtctacatggagttgatcaggctaagatctgacgacacggccgtgtattactgtgcgagagatggcccttcggggactcattatttcgcctccgggggagaggactactggggccagggaaccctgctcaccgtctcctcag

SEQ ID NO: 8543 - DNA, 376 bp, Homo sapiens
caggtgcagctggtgcagtctggggctgaggtgaagaagcctggggcctcactgaaagtctcctgcaaggcttctggatacacattcaccggctactatgtgcactgggtgcgacaggcccctggacaagggcttgagtggatgggatggatcaaccctaacagtggtggcacaatctatgcacagaagtttcaggacagggtcaccatgaccagggacacgtccatcaccacagtctacatggagctgagcaggctgagatctgacgacacggccgtgtattactgtgcgagagatgggccttcggggactcattatttcgcctccgggggagaggactactggggccagggaaccctgctcaccgtctcctcag

SEQ ID NO: 8544 - DNA, 376 bp, Homo sapiens
caggtgcacctggtgcagtctggggctgaggtgaagaagcctggggcctcagtgaaggtctcctgcaaggcttctggatacaccttcaccggctactttatgcactgggtgcgacaggcccctggacaagggcttgagtggatgggatggatcaaccctaacagtggtggcacaaactatgcacaggagtttcagggcagggtcaccttgaccaccgacacgtccaccaccacagcctacatggagctgaccaggctgagatctgacgacacggccgtttattactgtgcgagagatgggccttcggggactcattatttcgcctccgggggagaggattactggggccagggaaccctggtcaccgtctcctcag

SEQ ID NO: 8545 - DNA, 376 bp, Homo sapiens
caggtgcagctggtgcagtctggggctgaggtgaagaagcctggggcctcactgaaggtctcctgcaagtcttctggatacaccttcaccggctactatgtgcactgggtgcgacaggcccctggacaagggcttgagtggatgggatggatcaaccctaacagtggtggcacaaactatgcacagaagtttcagggcagggtcaccatgaccagggacacgtccatcaccacaacctacatggagctgagcaggctgagatctgacgacacggccgtgtattactgtgcgagagatgggccttcggggacttattatttcgcctccggggcagaggactactggggccagggaaccctgctcaccgtctcctcag

SEQ ID NO: 8546 - DNA, 376 bp, Homo sapiens
caggtgcagctggtgcagtctggggctgaggtgaagaagcctggggcctcactgaagatctcctgcaaggcttctggatacatcttcaccgcctactatgtgcactgggtgcgacaggcccctggacaagggcttgagtggatgggatggatcaaccctaacagtggtgccacaaactatgcacagaagtttcagggcagggtcaccatgaccagggacacgtccatcaccacagtctacatggagctgagcaggctgagatctgacgacacggccgtttattactgtgcgagagatgggccttcgggtagtcattatttcgcctccgggggagaggactactggggccagggaaccctgctcaccgtctcctcag

SEQ ID NO: 8547 - DNA, 376 bp, Homo sapiens
caggtgcagctggtgcagtctggggctgaggtgaagaagcctggggcctcagtgaaggtctcctgcgaggcttctggatacaccttcaccggctactatatgcactgggtgcgacaggcccctggacaagggcttgagtggatgggatggatcaaccctaacagtggtggcacaaactatgcagagaagtttcagggcagggtcaccatgaccagggacacgtccatgagaacagtatatatggaggtgagcaggctgacatctgacgacacggccgtgtattactgtgcgagagatgggccttcggggagttattatttcgcctccgggggagaggactactggggccagggaaccctggtcaccgtctcctcag

SEQ ID NO: 8548 - DNA, 376 bp, Homo sapiens
caggtgcagctggtgcagtctggggctgaggtgaagaagcctggggcctcagtgaaggtctcctgcaaggcttctggatacaccttcaccggctactatatgcactgggtgcgacaggcccctggacaagggcttgagtggatgggatggatcaaccctaacagtggtggcacaaactatgcagagaagtttcagggcagggtcaccatgaccagggacacgtccatcagaacagcatatatggagctgagcaggctgagatctgacgacacggccgtgtattactgtgcgagagatgggccttcggggagttattatttcgcctccgggggagaggactactggggccagggaaccctggtcaccgtctcctcag

SEQ ID NO: 8549 - DNA, 358 bp, Homo sapiens
gaggtgcgcctggaggagtctgggggaggcttggtccagcctggggggtccctgagactctcctgtgcagcctctggattcaccgtcattacctacaacatgaactgggtccgccaggctccagggaaggggctggagtgggtctcagttattcatagcggtggtagcacatactacgcagactccgtgaagggcagattcaccatctccagagacaattcgaagaacacgctgcatcttcaaatgaacagcctgagagccgaggacacggctgtatattactgtgtgagaggtgtttctcgaatctactggtacttcgatctctggggccgtggcaccctggtcactgtctcctcag

SEQ ID NO: 8550 - DNA, 358 bp, Homo sapiens
gaggtgcagctggaggagtctgggggaggcttggtccagcctggggggtccctgagactctcctgtgcagcctctggattcaccgtcagtacctacaacatgaactgggtccgccaggctccagggaaggggctggagtgggtctcagttattcatagcggtggtagtatatactacgcagactccgtgaagggcagattcaccatctccagagacaattcgaagaacacactgcatcttcaaatgaacagcctgagagccgaggacacggctgtatattactgtgtgagaggtgtttctcgaatctactggtacttcgatctctggggccgtggcaccctggtcactgtctcctcag

SEQ ID NO: 8551 - DNA, 358 bp, Homo sapiens
gaggtgcaggtggaagagtctgggggaggcttggtccagcctggggggtccctgagactctcctgtgcagcctctggattcaccgtcagtacctacaacatgaactgggtccgccaggctccagggaaggggctggagtgggtctcagttattcatgagggtggtagtgtatactacgcagactccgtgaagggcagattcagcatctccagagacaattcgaagaacacactgcatcttcaaatgaacagcctgagaggcgaggacacggctgtatattactgtgtgagaggtgtttctcgaatctactggtacttcgatctctggggccgtggcaccctggtcactgtctcctcag

SEQ ID NO: 8552 - DNA, 358 bp, Homo sapiens
gaggtgcagctggaggaatctgggggaggcttggtccagcctggggggtccctgagactctcctgtgcagcctctggattcaccgtcaatacgtacaacatgaactgggtccgccaggctccagggaagggtctggagtgggtctcagttattcatagtggtggtagtatatactacgcagactctgtgaagggcagattcaccttctccagagacaattcgaagaacacagtgcatcttcaaatgaacagcctgagagccgacgacacggctgtatattactgtgtgagaggggtttctcgaatctactggtacttcgatctctggggccgtggcaccctggtcactgtctcctcag

SEQ ID NO: 8553 - DNA, 357 bp, Homo sapiens
gaggtgcgcctggaggagtctgggggaggcttggtccagcctggggggtccctgagactctcctgtgcagcctctggattcaccgtcagtagctacaacatgaactgggtccgccaggctccagggaaggggctggagtgggtctcagttattcatagcggtggtagcacatactacgcagactccgtgaagggcagattcaccatctccagagacaattcgaagaacacgctgcatcttcaaatgaacagcctgagagccgaggacacggctgtatattactgtgtgagaggtgtttctcgaatctactggtacttcgatctctggggccgtggcaccctaatcactgtctcctca

SEQ ID NO: 8554 - DNA, 358 bp, Homo sapiens; identical to SEQ ID NO: 8551

SEQ ID NO: 8555 - DNA, 358 bp, Homo sapiens; identical to SEQ ID NO: 8549

SEQ ID NO: 8556 - DNA, 358 bp, Homo sapiens; identical to SEQ ID NO: 8551

SEQ ID NO: 8557 - DNA, 358 bp, Homo sapiens
gaggtgcgcctggaggagtctgggggaggcttggtccagcctggggggtccctgagactctcctgtgccgcctctggattcaccgtcattacctacaacatgaactgggtccgccaggctccagggaaggggctggagtgggtctcagttattcacagcggtggtagcacatactacgcagactccgtgaagggcagattcatcatctccagagacaattcgaagaacacgctgcatcttcaaatgaacagcctgagagccgaggacacggctgtatattactgtgtgagaggtgtttctcgaatctactggtacttcgatctctggggccgtggcaccctggtcactgtctcctcag

SEQ ID NO: 8558 - DNA, 358 bp, Homo sapiens; identical to SEQ ID NO: 8551

SEQ ID NO: 8559 - DNA, 357 bp, Homo sapiens
gaggtgcgcctggaggagtctgggggaggcttggtccagcctggggggtccctgagactctcctgtgcggcctctggattcaccgtcaataactacaacatgaactgggtccgccaggctccagggaaggggccggagtggatctcagtcattcatagcggtggttccacatactatgcagactccgtgaagggcagattcaccatctccagagacagttcgaagaacacggtgcatcttcaaatgaacagcctgagagccgaggacacggctttatattactgtgtgagaggtgtttctcgaatctactggtacttcgatctctggggccgcggcaccctaatcactgtctcctca

SEQ ID NO: 8560 - DNA, 357 bp, Homo sapiens
gaggtgcgcctggaggagtctgggggaggcttggtccagcctggggggtccctgagactctcctgtgcagcctctggattcaccgtcagtacctacaacatgaactgggtccgccaggctccagggaaggggctggagtgggtctcagttattcatagcggtggtagcacatactacgcagactccgtgaagggcagattcaccatctccagagacaattcgaagaacacgctgcatcttcaaatgaacagcctgagagccgaagacacggctgtatattactgtgtgagaggagtttctcgaatctactggtacttcgatctgtggggccgtggcaccctaatcactgtctcctca

SEQ ID NO: 8561 - DNA, 358 bp, Homo sapiens; identical to SEQ ID NO: 8551

SEQ ID NO: 8562 - DNA, 358 bp, Homo sapiens
gaggtgcgcctggaggagtctgggggaggcttggtccagcctggggggtccctgagactctcctgtgcagcctctggattcaccgtcattacctacaacatgaactgggtccgccaggctccagggaaggggctggagtgggtctcagttattcatagcggtggtagcacatactacgcagactccgtgaagggcagattcaccatctccagagacaattcgaagaacacgctgcatcttcaaatgaacagcctgagagccgaggacacggctgtatattactgtgtgagaggtatttctcgaatctactggtacttcgatctctggggccgtggcaccctggtcactgtctcctcag

SEQ ID NO: 8563 - DNA, 370 bp, Homo sapiens
gaggtgcagctggtggagtctgggggaggcttgctacagccagggcggtccctgagactctcctgtacaacttctggattcacctttggtgactatgctatgagctggttccgccaggctccagggaagggactggagtgggtgggtttcatcagaaacaatgcttatggtgagacaacagagtacgccgcgtctgtgaacggcagattcaccatctcaagagacgattccaaaagtatcgcccatctgcaaatgaacagcctgaaaatcgaggacacagccgtgtattactgcagtagaaacgccctaaatctacatctcgcccactttgaccagtggggccagggaaccctggtcatcgtctcctcag

SEQ ID NO: 8564 - DNA, 371 bp, Homo sapiens
gaggtgcagctggtggagtctgggggaggcttggtacagccagggcggtctttgagactctcctgtacaacttctggattcacctttggtgactatgctatgagctggtttccgccaggctccagggaagggactggagtgggtgggtttcatcagaaacaatgcttatggtgagacaacagaatacgccgcgtctgtgaatggcagattcaccatctcaagagacgattccaaaagtatcgcccatctgcaaatggacagcctgaaaatcgaggacacagccgtgtattattgcagtagaaacgccctaaatctacatctcgcccactttgaccagtggggccagggagccctggtcatcgtctcctcag

SEQ ID NO: 8565 - DNA, 370 bp, Homo sapiens
gaggtgcagctggtggagtctgggggaggcttggtacagccagggcggtctttgagactctcctgtacaacttctggattcacctttggtgactatgctatgagctggttccgccaggctccagggaagggactggagtgggtgggtttcatcagaaacaatgcttatggtgagacaacagaatacgccgcgtctgtgaatggcagattcaccatctcaagagacgattccaaaagtatcgcccatctgcaaatggacagcctgaaaatcgaggacacagccgtgtattattgcagtagaaacgccctaaatctacatctcgcccactttgaccagtggggccagggagccctggtcatcgtctcctcag

SEQ ID NO: 8566 - DNA, 370 bp, Homo sapiens; identical to SEQ ID NO: 8565

SEQ ID NO: 8567 - DNA, 370 bp, Homo sapiens; identical to SEQ ID NO: 8565

SEQ ID NO: 8568 - DNA, 370 bp, Homo sapiens
gaggtgcagcttgtggagtctgggggaggcttggtacagccagggcggtccctgagactctcctgtacaacttctggattcgcctttggtgactatgctatgagctggttccgccaggctccaggaaagggactggagtgggtgggtttcatcagaaccagtgtttatggtgagacaacagaatacgccgcgtctgtgcaaggcagattcaccatctccagagatgattccaaaagtatcgcccatctgcaaatgaacagtctgaaaaccgaggacacagccgtgtattactgcagtagaaacgccctaaatctgcatctcgcccactttgacttctggggccagggaaccctggtcaccgtctcctcag

SEQ ID NO: 8569 - DNA, 370 bp, Homo sapiens
gaggtgcagcttgtggagtctgggggaggcttggtacagccagggcggtccctgagactctcctgtacaacttctggattcacctttgctgactatgctatgagctggttccgccaggctccaggaaagggactggagtgggtgggtttcatcagaaccagtgcttatggtgagacaacagaatacgccgcgtctgtgcaaggcagattcaccatctccagagatgattccaaaagtatcgcccatctgcaaatgaacagcctgaaaaccgaggacacagccgtgtattactgcagtagaaacgccctaaatctgcatctcgcccactttgacttctggggccagggaaccctggtcaccgtctcctcag

SEQ ID NO: 8570 - DNA, 370 bp, Homo sapiens
gaggtgcagcttgtggagtctgggggaggcttggtacagccagggcggtccctgagactctcctgtacaacttctggattcgcctttggtgactatgctatgagctggttccgccaggctccaggaaagggactggagtgggtgggtttcatcagaaccagtgcttatggtgagacaacagaatacgccgcgtctgtgcaaggcagattcaccatctccagagatgattccaaaagtatcgcccatctgcaaatgaacagtctgaaaaccgaggacacagccgtgtattactgcagtagaaacgccctaaatctgcatctcgcccactttgacttctggggccagggaaccctggtcaccgtctcctcag

SEQ ID NO: 8571 - DNA, 370 bp, Homo sapiens
gaggtgcagcttgtggagtctgggggaggcttggtacagccagggcggtccctgagactctcctgtacaacttctggattcgcctttggtgactatgctatgagctggttccgccaggctccaggaaagggactggagtgggtgggtttcatcagaaccagtgcttatggtgagacaacagaatacgccgcgtctgtgcaaggcagattcatcatctccagagatgattccaaaagtatcgcccatctgcagatgaacagtctgaaaaccgaggacacagccgtgtattactgcagtagaaacgccctaaatctgcatctcgcccactttgacttctggggccagggaaccctggtcaccgtctcctcag

SEQ ID NO: 8572 - DNA, 370 bp, Homo sapiens
gaggtgcagctggtggagtctgggggaggcttggtccagccagggcggtccctgagactctcctgtacaacttctggattcacctttggtgactatgctatgagctggttccgccaggctccagggaagggactggagtgggtgggtttcatcagaaacaatgcttatggtgagacaacagaatacgccgcgtctgtgaacggcagattcaccatctcaagagacgattccaaaagtatcgcccatctggaaatgaacagcctgaaaatcgaggacacagccgtatattactgcagtagaaacgccctaaatatacatctcgcccactttgaccagtggggccagggaaccctggtcaccgtctcctcag

SEQ ID NO: 8573 - DNA, 370 bp, Homo sapiens
gaggtgcagctggtggagtctgggggaggcttggttcagccagggcggtccctgagactctcctgtacaacttctggattcacctttggtgactatgctatgagctggttccgccaggctccagggaagggactggagtgggtgggtttcatcagaaacaatgcttatggtgggacaacagaatacgccgcgtctgtgaaaggcagattcaccatctcaagagatgattccaaaagtatcgcccatctgcaaatgaacagcctgaaaaccgaggacacagccgtgtattactgcagtagaaacgccctaaatctacatctcgcccactttgactactggggccagggaaccctggtcaccgtctcctcag

SEQ ID NO: 8574 - DNA, 370 bp, Homo sapiens
gaggtgcagctggtggagtctgggggaggcttggtacagccagggcggtccctgagactctcctgtacaacttctggattcacctttggtgactatgctatgagctggttccgccaggctccagggaagggactggagtgggtgggtttcatcagaaacaatgcttatggtgggacaacagaatacgccgcgtctgtgaaaggcagattcaccatctcaagagatgattccaaaagtatcgcccatctgcaaatgaacagcctgaaaaccgaggacacagccgtgtattactgcagtagaaacgccctaaatctacatctcgcccactttgactactggggccagggaaccctggtcaccgtctcctcag

SEQ ID NO: 8575 - DNA, 370 bp, Homo sapiens
gaggtgcagttggtggagtctgggggaggcttggttcagccagggcggtccctgagactctcctgtacaacttctggattcacctttggtgactatgctatgagctggttccgccaggctccagggaagggactggagtgggtgggtttcatcagaaacaatgcctatggtgggacaacagaatacgccgcgtctgtggaaggcagattcaccatctcaagagatgattccaaaggtatcgcccatctgcaaatgaacagcctgaaaaccgaggacacagccttgtattattgcagtagaaacgccctaaatctacatctcgcccactttgactactggggccagggaaccctggtcaccgtctcctcag

SEQ ID NO: 8576 - DNA, 364 bp, Homo sapiens
caggtcaccttgagagagtctggtcctgcgctggtgaaacccacacagaccctcacactgacctgcaccttctctgggttctcactcagcactactggaatgtgtgtgagctgggtccgtcagcccccagggaaggccctggagtggcttgcacgcattgactgggatggtgataaatactacaacacatctctgaagaccaggctcaccatctccaaggacacctccaaaaaccaggtggtccttacaatgaccaacatggaccctgtggacacagccacgtattactgtgcacggacccggtataccagtggccgtccctttgactactggggccagggatccctggtcaccgtctcctcag

SEQ ID NO: 8577 - DNA, 364 bp, Homo sapiens
caggtcaccttgagggagtctggtcctgcgctggtgaaacccacagagaccctcacactgacctgcaccttctcggggttctcactcagcacgaatggaatgtgtgtgagctggatccgtcagcccccagggaaggccctggaatggcttgcacgcattgattgggatggtgataaatactacaacacatctctgaagaccaggctcaccatctccaaggacacctccaaagaccaggtggtccttacaatggccaacatggaccctgtggacacagccacgtatttctgtgcacggacccggtatatcaatggccgtccctttgactactggggccagggaaccctggtcaccgtctcctcag

SEQ ID NO: 8578 - DNA, 364 bp, Homo sapiens
caggtcaccttgagggagtctggtcctgcgctggtggaacccacacagaccctcacactgacctgcaccttctctgggttctcactcagcagtaataaaatgtgtgtgagctgggtccgtcagcccccagggaaggccctggaatggcttgcacggattgactgggatggtgataaatactataacacatctctgaggaccaggctcaccatctccaaggacacctccaaagaccaggtggtccttacaatgaccaacatggaccctatggacacagccacatattactgtgcacggacccggtatatcaatggccgtccctttgactactggggccagggaaccctggtcaccgtctcctcag

SEQ ID NO: 8579 - DNA, 364 bp, Homo sapiens
caggtcaccttgagggagtctggtcctgcgctggtgaaacccacacagaccctcacactgacctgcaccttctctgggttctcactcacgattagtggaatgtgtgtgagctgggtccgtcagcccccagggaaggccctggagtggcttgcacgcattgattgggatggtgataaatactacagcacatctctgaagaccaggctcaccatctccaaggacacctccaaaaaccaggtggtccttacaatggccaacatggaccctgtcgacacagccacgtattactgtgctcggacccggtataccaatggccgtccctttgactactggggccagggaaccctggtcaccgtctcctcag

SEQ ID NO: 8580 - DNA, 364 bp, Homo sapiens
caggtcaccttgagggagtctggtcctgcgctggtgaaacccacacagaccctcacactgacctgcaccttctctgggttctcactcacgattagtggaatgtgtgtgagctgggtccgtcagcccccagggaaggccctggagtggcttgcacgcattgattgggatggtgataaatactacaacacatctctgaagaccaggctcaccatctccaaggacacctccaaaaaccaggtggtccttacaatggccaacatggaccctgtcgacacagccacgtattactgtgctcggacccggtataccaatggccgtccctttgactactggggccagggaaccctggtcaccgtctcctcag

SEQ ID NO: 8581 - DNA, 364 bp, Homo sapiens
caggtcaccttgagggagtctggtcctgcgctggtgaaacccacacagaccctcacactgacctgcaccttctctgggttctcactcagcactagtggaatgtgtgtgagctgggtccgtcagcccccagggaaggccctggagtggcttgcacgcattgattgggatgatgataaatactacagcacatctctgaagaccaggctcaccctctccaaggacacctccaaaaaccaggtggtccttacaatgaccaacatggaccctgtcgacacagccacatattactgtgcacggacccggtataccaatggccgtccctttgactactggggccagggaaccctggtcaccgtctcctcag

SEQ ID NO: 8582 - DNA, 364 bp, Homo sapiens
caggtcaccttgagggagtctggtcctgcgctggtgaaacccacacagaccctcacactgacctgcaccttctctgggttctcactcatcactaatggaatgtgtgtgagttgggtccgtcagcccccagggaaggccctggagtggcttgcacgcatcgactgggatggtgataaatactataatacttctctgaagacaaggctcaccatctccagggacacctccaaaaaccaggtggtcctcacaatgaccaatgtggaccctgtggacacagccacgtattactgtgcacggacccgctataccaatggccgtccctttgactactggggccagggaaccctggtcaccgtctcctcag

SEQ ID NO: 8583 - DNA, 370 bp, Homo sapiens
caggtgcagctgcaggagtcgggcccaggactggtgaagccttcggagaccctgtccctcacttgcactgtctctggtggctccatcagtagttactactggagctggatccggcagcccccagggaagggactggagtggattgggtatatctattacagtgggagcaccaactataacccctccctcaagagtcgagtcaccatgtcagtagacacgtccaagaaccagttctccctgaagctgagctccgtgaccgctgtggacacggccgtgtattactgtgcgagcgggcggtataactggaactaccagtccggtgggtacttcgatctctggggccgtggcaccctggtcactgtctcctcag

SEQ ID NO: 8584 - DNA, 370 bp, Homo sapiens
caggtgcagctgcaggagtcgggcccaggactggtgaagccttcggagaccctgtccctcacctgcactgtctctggtggctccatcagtagttattactggaactggatccggcagcccccagggaagggactggagtggattgggtatgtctattacagtgggagcaccaactacaacccctccctcaagagtcgagtcaccatatcactagacacgtccaagaaccagttctccctgaagctgagctctgtgaccgctgcggacacggccgtgtattactgtgcgagcgggcggtataactggaactaccagtccggtgggtacttcgatctctggggccgtggcaccctggtcactgtctcctcag

SEQ ID NO: 8585 - DNA, 370 bp, Homo sapiens
caggtgcagctgcaggagtcgggcccaggactggtgaagccttcggagaccctgtccctcacctgcactgtctctggtggctccatcagtagttactactggagttggatccggcagcccccagggaagggactggagtggattgggtatatctattacagtgggagcaccaactacaacccctccctcaagagtcgagtcaccatgtcagtagacacgtccaagaaccagttctccctgaagctgacctctgtgaccgctgcggacacggccgtgtattactgtgcgagcgggcggtataactggaactaccagtccggtgggtatttcgatctctggggccgtggcaccctggtcactgtctcctcag

SEQ ID NO: 8586 - DNA, 370 bp, Homo sapiens
caggtgcagctgcaggagtcgggcccaggactggtgaagccttcggagaccctgtccctcagctgcactgtctctggtggctccatcagtacttactactggagctggatccggcagcccccagggaagggactggagtggattgggtatatctattacagtgggagcaccaactacaacccctccctcaagagtcgagtcaccatatcagtagacgcgtccaagaaccagttctccctgaagctgagctctgtgaccgctgcggacacggccgtgtattactgtgcgagcgggcggtataactggaactaccagtccggtgggtacttcgatctctggggccgtggcaccctggtcactgtctcctcag

SEQ ID NO: 8587 - DNA, 370 bp, Homo sapiens; identical to SEQ ID NO: 8584

SEQ ID NO: 8588 - DNA, 370 bp, Homo sapiens
caggtgcagctgcaggagtcgggcccaggactggtgaagccttcggagaccctgtccctcacctgcactgtctctggtggctccatcagtagttactactggagttggatccggcagcccccagggaagggactggagtggattggatatatttattacagtgggagcaccaactacaacccctccctcaagagtcgagtcaccatgtcagtagacacgtccaagaaccagttctccctgaagttgagctctgtgaccgctgcggacacggccgtgtattactgtgcgagcgggcggtataactggaacttccagtccggtgggtacttcgatctctggggccgtggcaccctggtcactgtctcctcag

SEQ ID NO: 8589 - DNA, 367 bp, Homo sapiens
caggttcagctggtgcagtctggagctgaggtgaagaagcctggggcctcagtgaaggtctcctgcaaggcttctggttacacctttaccaactatggtatcagctgggtgcgacaggcccctggacaagggcttgagtggatgggaaggatcagcgcttacaatggtaacacaaactatgcacagaagctccagggcagagtctccatgaccacagacacatccacgagcacagcctacatggagctgaggagcctgagatctgacgacacggccgtgtattactgtgcgagagatttgggatggctacaattcccgtactactttgactactggggccagggaaccctggtcaccgtctcctcag

SEQ ID NO: 8590 - DNA, 367 bp, Homo sapiens; identical to SEQ ID NO: 8589

SEQ ID NO: 8591 - DNA, 367 bp, Homo sapiens; identical to SEQ ID NO: 8589

SEQ ID NO: 8592 - DNA, 367 bp, Homo sapiens; identical to SEQ ID NO: 8589

SEQ ID NO: 8593 - DNA, 367 bp, Homo sapiens; identical to SEQ ID NO: 8589

SEQ ID NO: 8594 - DNA, 367 bp, Homo sapiens; identical to SEQ ID NO: 8589

SEQ ID NO: 8595 - DNA, 370 bp, Homo sapiens
caggtgcagctggtggagtctgggggagacttggtcaagcctggagggtccctgagactctcctgtgcagcctctggattcaccttcagtgactcctacatgagctggatccgccaggctccagggaaggggctggagtgggtttcatacattagtggtactggttccaccatatactacgcagactctgtgaagggccgattcaccatctccagggacaacgccaacaactcactgtatctgcagatgagtagcctgagcgccgaggacacggccgtgtattactgtgcgagagatagatattttggaacctggttgggaaactggttcgacccctggggccagggaaccctggtcaccgtctcctcag

SEQ ID NO: 8596 - DNA, 368 bp, Homo sapiens
caggtgcagctggtggagtctgggggagacttggtcaagcctggagggtccctgagactctcctgtgccgcttctggattcaccttcagtgacaattatatgagttggatccgccaggctccagggaaggggctggagtgggtttcatacattagtggtagtggtactaccacatactacgcagactctgtgaagggccgattcaccatctccagggacaacgccaagaactcactgtatctgcaaatgagcagcctgagcgccgacgacacggccgtctattactgtgcgagagatagatattttggctcctggctgggaaactggttcgacccctggggccagggaaccctggtcaccgtctcctc

SEQ ID NO: 8597 - DNA, 370 bp, Homo sapiens
caggtgcagctggtggagtctgggggaggcttggtcaagcctggagggtccctgagactctcctgtgcagcctctggattcaccttcagtgactcctacatgagctggatccgccaggctccagggaaggggctggagtgggtttcatacattagtggtagtggttccaccatatactatgcagactctgtgaagggccgattcaccatctccagggacaacgccaacagcttactgtatctgcaaatgagcagcctgagcgccgaggacacggccgtgtattactgtgcgagagatagatattttggctcctggttgggaaactggttcgacccctggggccagggaaccctggtcaccgtctcctcag

SEQ ID NO: 8598 - DNA, 368 bp, Homo sapiens
caggtgcagctggtggagtctgggggagacttggtcaagcctggagggtccctgagactctcctgtgtcgcttctggattcaccttcagtgacaattatatgagctggatccgccaggctccagggaaggggctggagtgggtttcatacattagtggtagtggtactaccacatactacgcagactctgtgaagggccgattcaccatctccagggacaacgccaagaactcactgtatctgcaaatgagcagcctgagcgccgaggacacggccgtctattactgtgcgagagatagatattttggctcctggctgggaaactggttcgacccctggggccagggaaccctggtcaccgtctcctc

SEQ ID NO: 8599 - DNA, 370 bp, Homo sapiens
caggtgcaactggtggagtctgggggagacttggtcaagcctggagggtccctgagactctcctgtgcagcctctggattcaccttcagtgactcctacatgagttggatccgccaggctccagggaaggggctggaatggatttcatacattagtggcagtggtgataccaaatactacgcagactccgtgaagggccgattcaccatctccagggacaatgccaagaactcactgtatctggaaatgagcagcctgagcgccgaggacacggccatgtattattgtgcgagagatagatattttggccgctggttggggaactggttcgacccctggggccagggaaccctggtcactgtctcatcag

SEQ ID NO: 8600 - DNA, 370 bp, Homo sapiens
caggcgcaggtggtggagtctgggggaggtttggtcgagcctggagggtatctgcgactctcctgcgcagcctctggattcaccttcagtgactcgtacatgagctggatccgccaggctccagggaaggggctggagtgggtttcatccatcagtggaagtggcgataagatatactatgcagaccctgtgaagggacgattcgccatctccagggacaattccaagaattctctgtctctgcaaatgggtctcctgaccgccgacgacacggccgtgtattattgtgcgagagatagatattttggttcctgggtggggacctggttcgacccctggggccagggaaccctggtcatcgtctcctcag

SEQ ID NO: 8601 - DNA, 370 bp, Homo sapiens
caggcgcaggtggtggagtctgggggaggtttggtcaagcctggagggtacctgagactctcctgcgcagcctctggattcaccttcagtgactcgtacatgagctggatccgccaggctccagggaaggggctggagtgggtttcatccatcagtagaagtggcgatacgatatactacgcagactctgtgaagggacgattcgccatctccagggacaactccaagaactctctgtctctgcaaatgggtctcctgaccgccgacgacacggccgtatattactgtgcgagagatagatactttggttcctgggtgggaacctggttcgacccctggggccagggaaccctagtcatcgtctcctcag

SEQ ID NO: 8602 - DNA, 370 bp, Homo sapiens
caggtgcaggtggtggagtctgggggaggcttggtcaagcctggagggtccctgagactctcctgcgcagcctctggatttaccttcagtgactcgtacatgagctggatccgccaggcaccagggaaggggctggagtgggtttcatccattagtggaagtggcaatacgatatactacgcagactctgtgaagggccgattcaccatctccagggacaacgccaagaactcactctatctgcaaatgggtagcctgagcgccgaggacacggccgtgtattactgtgcgagagatagattttttggctcctgggtgggaacctggttcgacccctggggccagggaaccctggtcaccgtctcctcag

SEQ ID NO: 8603 - DNA, 370 bp, Homo sapiens
caggtgcaggtggtggagtctgggggaggcttggtcaagcctggagggtccctgagactctcctgcgcagcctctggattcaccttcagtgactcgtacatgagctggatccgccaggctccagggaaggggctggagtgggtttcatctattagtggaagtggcaataccatatactacgcagactctgtgaagggccgattcaccatctccagggacaacgccaagaactcactgtatctgcaaatgggtagcctgagcgccgaggacacggccgtgtattactgtgcgagagatagattttttggctcctgggtgggaacctggttcgacccctggggccagggaaccctggtcaccgtctcctcag

SEQ ID NO: 8604 - DNA, 370 bp, Homo sapiens
caggtgcaggtggtggagtctgggggaggcttggtcaagcctggagggtccctgagactctcctgcgcagcctctggattcaccttcagtgactcgtacatgagctggatccgccaggctccagggaaggggctggagtgggtttcatacattagtggaagtggcaatacgatatactacgcagactctgtgaagggccgattcaccatctccagggacaacgccaagaactcactgtatctgcaaatgagtagcctgagcgccgaggacacggccgtgtattactgtgcgagagatagattttttggctcctgggtgggaacctggttcgacccctggggccagggaaccctggtcaccgtctcctcag

SEQ ID NO: 8605 - DNA, 375 bp, Homo sapiens
gaggtgcagctggtggagtctgggggaggcttggtccagcctggggggtccctgagactctcctgtgaagcctctggattcaccttcagtagttactggatgcactgggtccgccaagctccagggaaggggctggtgtgggtctctcacattaatagtgatgggagtagcacaagttacgcggactccgtgaagggccgattcaccatctccagagacaacgctaagaacacgctgtatttgcaaatgaacagtctgagagacgaggacacggctgtctactactgtgcaagagatccccagtaccagctgctccactactattactactacatggacgtctggggcaaagggaccacggtcgccgtctcctca

SEQ ID NO: 8606 - DNA, 375 bp, Homo sapiens
gaggtgcagctggtggagtccgggggaggcttagttcagccgggggggtccctgagactctcctgtgaagcctctggattcaccttcagtagttactggatgcactgggtccgccaagctccagggaaggggctggtgtgggtctctcacattaatagtgatgggagtagcacaagttacgcggactccgtgaagggccgattcaccatctccagagacaacgctaagaacacgctgtatttgcaaatgaacagtctgagagacgaggacacggctgtctactactgtgcaagagatccccagtaccagctgctccactactattactactacatggacgtctggggcaaagggaccacggtcgccgtctcctca

SEQ ID NO: 8607 - DNA, 375 bp, Homo sapiens
gaggtacaactggtggagtccgggggaggcttagttcagccgggggggtccctgagactctcctgtgaagcctctggattcaccttcagtagttactggatgcactgggtccgccaagctccagggaaggggctggtgtgggtctctcacattaatagtgatgggagtagaacaagttacgcggactccgtgaagggccgattcaccatctccagagacaacgctaagaacacgctgtatttgcaaatgaacagtctgagagacgaggacacggctgtctattactgtgcaagagatccccagtatcagctgctccactactattactactacatggacgtctggggcaaagggaccacggtcgccgtctcctca

SEQ ID NO: 8608 - DNA, 375 bp, Homo sapiens; identical to SEQ ID NO: 8606

SEQ ID NO: 8609 - DNA, 374 bp, Homo sapiens
gaggtacaactggtggagtccgggggaggcttagttcagccggggggtccctgagactctcctgtgaagcctctggattcaccttcagtagttactggatgcactgggtccgccaagctccagggaaggggctggtgtgggtctctcacattaatagtgatgggagtagaacaagttacgctgactccgtgaagggccgattcaccatctccagagacaacactaagaacacgctgtatttgcaaatgaacagtctgagagacgaggacacggctgtctattactgtgcaagagatccccagtaccagctgctccactactattactactacatggacgtctggggcaaagggaccacggtcgccgtctcctca

SEQ ID NO: 8610 - DNA, 355 bp, Homo sapiens
gaggtgcagctggtggagtctggaggaggcttgatccagccgggggggtccctgagactctcctgtgcagcctctgggttcaccgtcagtaacaactacatgacctgggtccgccaggctccagggacggggctggagtgggtctcagttatttatagcggtggtagcacacactacgcagactccgtgaagggccgattcaccatctccagagacgattccaagaacactctgtatcttcaaatgaacaacctgagagccgaggacacggccgtgtattactgtgcgcgagatcttggagtggctggtactcttgacctctggggccagggaaccctggtcaccgtctcctcag

SEQ ID NO: 8611 - DNA, 355 bp, Homo sapiens; identical to SEQ ID NO: 8610

SEQ ID NO: 8612 - DNA, 355 bp, Homo sapiens
gaggtgcagctggtggagtctggaggaggcttgatccagccgggggggtccctgagactctcctgtgcagcctctgggttcaccgtcagtaacaattacatgacctgggtccgccaggctccagggaaggggctggagtgggtctcagttgtttatagcggtggtaccacacagtacgcagactccgtgaagggccgattcaccgtcttcagagacaattccaagaatactctgtatcttcaaatgaacaacctgagagccgaggacacggccgtgtattactgtgcgcgagatcttggagtggctggtactcttgacctctggggccagggaaccctggtcaccgtctcctcag

SEQ ID NO: 8613 - DNA, 355 bp, Homo sapiens; identical to SEQ ID NO: 8612

SEQ ID NO: 8614 - DNA, 355 bp, Homo sapiens
gaggtgcaactggtggagtctggaggaggcttgatccagccgggggggtccctgagactctcctgtgcagcctctgggctcaccgtcagtaacaattacatgacctgggtccgccaggctccagggaaggggctggagtgggtctcagttgtttatagcggtggtaccacacaatacgcagactccgtgaagggccgattcactgtcttcagagacaactccaagaatactctgtatcttcaaatgaacaacttgagagccgaggacacggccgtgtattactgtgcgcgagatcttggaggggctggtactcttgacctctggggccaggggaccctggtcaccgtctcctcag

SEQ ID NO: 8615 - DNA, 363 bp, Homo sapiens
caggtgcacctggtggagtctgggggaggcgtggtccagcctggggggtccctgagactctcctgtgcggcgtctggattcaccttcagtacctatggcatgcactgggtccgccaggctccaggcaaggggctggagtgggtggcagttatatggtatgatggaagtgaaaaatactatgcagactccgtgaagggccgattcaccatttccagagacaattccaagaacacgctgtatgtgcaaatgagcagcctgagagccgaggacacggctgtatattattgtgcgagagctatgggggcaacgttgcgttacggtatggacgtctggggccaagggaccacggtcaccgtctcctca

SEQ ID NO: 8616 - DNA, 363 bp, Homo sapiens
caggtgcacctggtggagtctgggggaggcgtggtccagcctgggaggtccctgagactctcctgtgcagcgtctggattcaccttcagtagctatggcatgcactgggtccgccaggctccaggcaaggggctggagtgggtggcagttatatggtatgatggaagtgataaatactatgcagactccgtgaagggccgattcaccatttccagagacaattccaagaacacgctgtatgtgcaaatgaacagcctgagagccgaggacacggctgtatattattgtgcgagaggtatgggggcaacgttgcgctacggtatggacgtctggggccaagggaccacggtcaccgtctcctca

SEQ ID NO: 8617 - DNA, 363 bp, Homo sapiens
caggtgcacctggtggagtctgggggaggcgtggtccagcctgggaggtccctgagactctcctgtgcagcgtctggattcaccttcagtagctatggcatgcactgggtccgccaggctccaggcaaggggctggagtgggtggcagttatatggtatgatggaagtgataaatactatgcagactccgtgaagggccgattcaccatctccagagacaattccaagaacacgctgtatctgcaaatgaacagcctgagagccgaggacacggctgtatattattgtgcgagaggtatgggggcaacgttgcgctacggtatggacgtctggggccaagggaccacggtcaccgtctcctca

SEQ ID NO: 8618 - DNA, 363 bp, Homo sapiens; identical to SEQ ID NO: 8616

SEQ ID NO: 8619 - DNA, 370 bp, Homo sapiens
caggtgcatctggtggagtctgggggagacttggtcaaccctggagggtccctcagactctcctgtgcagcctcgggattcacattcagtgacaattatatgagttggatccggcaggcgccagggaaggggctggagtggattacatacattagtggtagtggtacaactatatattacgcagactctgtgaagggccgattcaccatctccagggacaacgccaagaactcactgtttctgcaaatgagcaacctgagcgccgaggacacggccgtctattactgtgcgagagatctatattttggctcctacttgggaaattggttcgactcctggggccagggaaccctggtcaccgtctcctcag

SEQ ID NO: 8620 - DNA, 370 bp, Homo sapiens; identical to SEQ ID NO: 8619

SEQ ID NO: 8621 - DNA, 370 bp, Homo sapiens
caggtgcatctggtggagtctgggggagacttggtcaaccctggagggtccctcagactctcctgtgtagcctcgggattcacatttagtaacaattatatgagttggatccggcaggcgccagggaaggggctggagtggattacatacattagtggtagtggtacaactatatattacgcagactctgtgaagggccgattcaccatctccagggacaacgccaagaactcagtgtttctgcaaatgagcaacctgagcgccgaggacacggccgtctattactgtgcgagagatctatattttggctcctatttgggaaattggttcgactcctggggccagggaaccctggtcaccgtctcctcag

SEQ ID NO: 8622 - DNA, 370 bp, Homo sapiens
caggtgcatctggtggagtctgggggagacttggtcaaccctggagggtccctcagactctcctgtgcagcctcgggattcacattcagtggcaattatatgagttggatccggcaggcgccagggaaggggctggagtggattacatacatcagtggtagtggtacaactatatattacgcagactctgtgaagggccgattcaccatctccagggacaacgccaagaactcgctgtttctgcaaatgagcaacctgagcgccgaggacacggccgtctattactgtgcgagagatctatattttggctcctacttgggaaattggttcgactcctggggccagggaaccctggtcaccgtctcctcag

SEQ ID NO: 8623 - DNA, 367 bp, Homo sapiens
cagctgcagctgcaggagtcgggcccaggagtggtgaagccttcggagaccctgtccgtcacctgcactgtctctggtggctccatcagcagtaggagttactactggggctggatccgccagcccccagggaagggactggagtggattggaaatataaactatagcgggaacacccacaacaatgcgtccttcaagagtcgagtcaccttatccgtcgacacgtccaagaaccagctctccctggacctgacctctgcgaccgccgcagacacggctgtctattactgtgcgagacgtgccccatttggaatgaacattatatttgactactggggccagggaaccctggtcaccgtcgcctcag

SEQ ID NO: 8624 - DNA, 367 bp, Homo sapiens
cagctgcagctgcaggagtcgggcccaggactggtgaagccttcggagaccctgtccctcacctgcactgtctctggtggctccttcagcagtaggagttactactggggctggatccgccagcccccagggaagggactggagtggattggaaatataaactatagtgggaacacccacaacaatgcgtccctcaagagtcgagtcaccttatccgtcgacacgtccaagaaccagctctccctgaacctgacctctgcgaccgccgcagacacggctgtatattactgtgcgagacgtgccccatttggaatgaacattatatttgactactggggccagggaaccctggtcaccgtcgcctcag

SEQ ID NO: 8625 - DNA, 367 bp, Homo sapiens
cagctgcagctgcaggagtcgggcccaggagtggtggagccttcggggaccctgtccctcacctgcactgtctctggtggctccatcagcagtaggagtttctactggggctggatccgccagcccccagggaagggactggagtggattggaaatatcaactatagtgggaacacccacaacaatgcgtccttcaagagtcgagtcaccttgtccgtcgacacgtccaagaaccagctctcccttaacctgacctctgtgaccgccgcagacacggctgtatattactgtgcgaggcgtgccccatttggaatgaacattatttttgactactggggcctgggaaccctggtcaccgtcgcctcag

SEQ ID NO: 8626 - DNA, 364 bp, Homo sapiens
cagctgcagctgcaggagtcgggcccaggactggtgaagccttcggagaccctgtccctcacctgcactgtctctggtggctccatcagccgtagtagtaactactggggctggatccgccagcccccagggaagggactggagtgggttgggagtatctattatagtgggaacaccgactacaacccgtccctcaagagtcgagtcaccatatccgtaggcacgtccaagaaccagttctccctgaagctgagctctgtgaccgccacagacacggctatgtattactgtgcgagaggatatagcagcagctggtactactttgactactggggccaaggaaccctggtcaccgtctcctcag

SEQ ID NO: 8627 - DNA, 364 bp, Homo sapiens; identical to SEQ ID NO: 8626

SEQ ID NO: 8628 - DNA, 364 bp, Homo sapiens; identical to SEQ ID NO: 8626

SEQ ID NO: 8629 - DNA, 375 bp, Homo sapiens
caggtgcagctggtgcagtctgggactgaggtgaagaagcctggggcctcaataaagatcacctgcaaggcttctggatacaccttcaccggctactatctgcactgggtgcgacagtcccctggacaggggcttgagtggatgggatggatcaaccctaacagtggtggcacagagtctgcacagaagtttcagggcagggtcaccatgaccagggacacgtccgtcagagcagcctacatggagctgagcagactgacgtctgacgacacggccgtatattactgtgcgaaggctggcagcagctggtacgggacggtgtacttccacttcctggacgtctggggcaacgggaccacagtcaccgtcgcctca

SEQ ID NO: 8630 - DNA, 375 bp, Homo sapiens; identical to SEQ ID NO: 8629

SEQ ID NO: 8631 - DNA, 375 bp, Homo sapiens; identical to SEQ ID NO: 8629

SEQ ID NO: 8632 - DNA, 337 bp, Homo sapiens
caggtgcagctgcaggagtcgggcccaggactggtgaagccttcggagaccctgtccctcacctgcactgtctctggtggctccatcactagttactactggagctggatccggcagcccccagggaagggactggagtggattgggtatatctattacagtgggaccaccaactacaacccctccctcaagagtcgagtcaccatctcagtagacacgtccaagaaccagttctccctaaagctgagctctgtgaccgccgcagacacggccgtgtattactgtgcgagagggtttgactactggggccaggggaccctggtcaccgtctcctcag

SEQ ID NO: 8633 - DNA, 337 bp, Homo sapiens
caggtgcagctgcaggagtcgggcccaggactggtgaagccttcggagaccctgtccctcatctgcagtgtctctggtggctccatcagtaattactactggagctggatccggcagcccccagggaaggggctggagtggattggatatatctatcacagtgggagcaccaactacaacccctccctcaagagtcgagtcaccatatcagtagacacgtccaagaaccagttctccctgaagctgagctctgtgaccgccgcagacacggccgtctattactgtgcgagagggtttgactactggggccagggaaccctggtcaccgtctcctcag

SEQ ID NO: 8634 - DNA, 337 bp, Homo sapiens
caggtgcagctgcaggagtcgggcccaggactggtgaagccttcggagaccctgtccctcacctgcactgtctctggtggctccatcagtacttactactggagctggatccggcagcccccagggaagggactggagtggattggatatatctattacactgggagcaccaactacaacccctccctcaagagtcgagtcaccatatcagtagacacgtccaagaaccagttctccctgaagcttacctctgtgaccgctgcggacacggccgtgtattactgtgcgagaggttttgactactggggccagggaaccctggtcaccgtctcctcag

SEQ ID NO: 8635 - DNA, 355 bp, Homo sapiens
caggtgcagctggtgcagtctggggctgaggtgaagaagcctggggcctcagtgaaggtctcctgcaagccttctggatacaccttcagtggcttctacgtccactgggtgcgacaggcccctggacaagggcttgagtggatgggatggatcaaccctaacagtggtgccacaaactatgcacagaagtttcagggcagggtcatcatgaccagagacacgtccatcagcacagcctacatggagctgagtaggctgagacctgacgacacggccgtgtattactgtgcgagagagagtaacctttactactttgactactggggccagggaaccctggtcaccgtctcctcag

SEQ ID NO: 8636 - DNA, 355 bp, Homo sapiens; identical to SEQ ID NO: 8635

SEQ ID NO: 8637 - DNA, 355 bp, Homo sapiens
caggtgcagctggtgcagtctggggctgaggtgaagaagcctggggcctcagtgaaggtctcctgcaaaccttctggatacaccttcagtggcttctacgtccactgggtgcgacaggcccctggacaagggcttgagtggatgggatggatcaaccctaacagtggtgccacaaactatgcacagaagtttcagggcagggtcatcatgaccagagacacgtccatcagcacagcctacatggagctgagtaggctgagacctgacgacacggccgtgtattactgtgcgagagagagtaacctttactactttgactactggggccagggaaccctggtcaccgtctcctcag

SEQ ID NO: 8638 - DNA, 361 bp, Homo sapiens
gaggtgcaactggtggagtctggaggaggcttgatccagcctggggggtccctgagactctcctgtgcagcctctgggttcaccgtcagaaccaactacatgagctgggtccgccaggctccagggaaggggctggagtgggtctcagttatctatagcggtggtagcacatactacgcagactccgtgaagggccgattcaccatctccagagacaattcgaagaacacactgtatcttcaaatgaacagcctgagagccgaggacacggccgtgtattactgtgcgagacatggatatagctatggttactcctactttgactactggggccagggaaccctggtcaccgtctcctcag

SEQ ID NO: 8639 - DNA, 361 bp, Homo sapiens
gaggtgcaactggtggagtctggaggaggcttgatccagcctggggggtccctgagactctcctgtgcagcctctgggttcaccgtcagaaccaactacatgagctgggtccgccaggctccagggaaggggctggagtgggtctcagttatctatagcggtggtagcacatactacgcagactccgtgaagggccgattcaccatctccagagacaattcgaagaacaagctgtttcttcaactgaacagcctgagagccgaggacacggccgtttattactgtgcgagacatggctacagctatggttactcctactttgactactggggccagggaatcctggtcaccgtctcctcag

SEQ ID NO: 8640 - DNA, 360 bp, Homo sapiens
caggtgcagctgcaggagtcgggcccaggactggtgaagccttcggagaccctgtccctcacttgcactgtctctggtggctccatcagtagttactactggagctggatccggcagcccccagggaagggactggagtggattgggtatttctattatagtgggaggacctactacaacccctccctcaagagtcgagtcaccatatcagtagacacgtccaagaaccaattctccctgaagttgagttctgtgaccgctgcggacacggccgtgtattactgtgcgagatggttttgtactaccaactgcgcgtacatggacgtcttgggcaaagggaccacggtcaccgtctcctca

SEQ ID NO: 8641 - DNA, 360 bp, Homo sapiens
caggtgcagctgcaggagtcgggcccaggactggtgaagccttcggagaccctgtccctcacttgcactgtctctggtggctccatcagtagttactactggagctggatccggcagcccccagggaagggactggagtggattgggtatttctattatagtgggagcacctactacaacccctccctcaagagtcgagtcaccatatcagtagacacgtccaagaaccaattctccctgaagttgagttctgtgaccgctgcggacacggccgtgtattactgtgcgagatggttttgtactaccaactgcgcgtacatggacgtcttgggcaaagggaccacggtcaccgtctcctca

SEQ ID NO: 8642 - DNA, 370 bp, Homo sapiens
caggagcagctggtgcagtctgggggaggcctggtcaagcctggagggtccctgagactctcctgtgcagcctctggattcaccttcagtagttattatatgagctggattcgccaggctccagggaaggggctggagtggctttcatacattagtggtagtggcactaccatatattacgcagactctgtgaagggccgcttcaccatttccagggacaacgcccagaactcactgtatctgcaaatgaacagcctgagcgccgaggacacggccgtgtatttttgtgcgaaagatagatattttggttcttggtcgggaaactggttcgacgcctggggccagggaaacctggtcatcgtcacctcag

SEQ ID NO: 8643 - DNA, 370 bp, Homo sapiens
caggagcaactggtggagtctgggggaggcctggtcaagcctggagggtccctgacactctcctgtgcagcctctggatttactttcggtagttattatatgagctggattcgccaggctccagggaaggggctggagtggatttcatacattagtggcagtggcactaccatatattacgcagagtctgtgaagggccgcttcaccgtctccagggacaacgcccagaactcactgtatctgcaaatgagcagcctgagcgccgaggacacggccgtatattactgtgcgaaagatagatattttggttcttggttgggaaactggttcgacgcctggggccagggaaacctggtcatcgtctcctcag

SEQ ID NO: 8644 - DNA, 370 bp, Homo sapiens
gagacgcagctgttggactctgggggagacttggttcagcctggggggtccctgagactctcctgtgcagcctctggtttcaccttcagcagctttgccatgacctgggtccgccaggctccagggaaggggctggagtgggtctccgctattactagtggtggtgatagcacattctacgcagactccgtgaagggccggttcaccatctccagagacaactccaagaacacactgtatctgcaactgaatagtctgagagccgaggacacggccgtatattactgcgcgaaagtataccccacgggcgcaattagagtttggtactttgactcttggggccagggaaccctggtcaccgtctcctcag

SEQ ID NO: 8645 - DNA, 370 bp, Homo sapiens
gagacgcagctgttggactctgggggagacttggttcagcctggggggtccctgagactctcctgtgcagcctctggtttcaccttcagcaactttgccatgaactgggtccgccaggctccagggaaggggctggagtgggtctcctctattaccagtagtggtgatagcacattctacgcagactccgtgaagggccgcttcaccatctccagagacaactccaagaacacgctgtatctgcaactgaatagcctgagagccgaggacacggccgtatattactgtgcgaaagttgtccccacgggcgcaattagagtttggtactttgactcttggggccagggaacgctggtcaccgtctcctcag

SEQ ID NO: 8646 - DNA, 375 bp, Homo sapiens
caggtgcagctggtggagtctgggggaggcgtggtccagcctgggaggtccctgagactctcctgtgcagcgtctggattcaccttcagtggctatggcatgcactgggtccgccaggctccaggcaaggggctggagtgggtggcacttatctggtatgacggaggtaataaattctatggagactccgtgaagggccgattcaccatctccagagacaattccaagaacacactgtatctgcaaatggatagcctgagagccgaggacacggctgtgtatttctgtgcgagaaaacgatattttgactggtctcggtcctactactacggtatggacgtctggggccaagggaccacggtcaccgtctcctca

SEQ ID NO: 8647 - DNA, 375 bp, Homo sapiens; identical to SEQ ID NO: 8646

SEQ ID NO: 8648 - DNA, 385 bp, Homo sapiens
caggtgcagctgcaggagtcgggcccaggactggtgaagccttcacagaccctgtccctcacctgcagtgtctctgggggctccatcagcagtggtggttactactggaactggatccgccagctcccagggaagggcctggagtggattgggtacatctattacagtgggagcacctactacaatccgtccctcaagagtcgagttaccatatcagtagacacgtctaagaaccagttctccctgaagctgagctctgtgactgccgcggacacggccgtgtattactgtgcgagagatgggtccgattattgtagtagtaccagctgctatacggggtggttcgacccctggggccagggaaccctggtcaccgtctcctcag

SEQ ID NO: 8649 - DNA, 385 bp, Homo sapiens
caggtgcagctgcaggagtcgggcccaggactggtgaagccttcacagaccctgtccctcacctgcactgtctctggtggctccatcagcagtggtggttactactggaactggatccgccagcacccagtgaagggcctggagtggattgggtacatctattacagtgggagtacctactacaacccgtccctcaagagtcgagttaccatatcagtagacacgtctaagaaccagttctccctgaagctgagctctgtgactgccgcggacacggccgtgtattactgtgcgagagatgggtccgattattgtagtagtaccagctgctatacggggtggttcgacccctggggccagggaaccctggtcaccgtctcctcag

SEQ ID NO: 8650 - DNA, 355 bp, Homo sapiens
caggtgcagctgcaggagtcgggcccaggactggtgaagccttcacagaccctgtccctcacctgcactgtctctggtggctccatcaccagtggtggttactactggagctggatccgccagcacccagggaagggcctggagtggattgggtacatctattacggtgggaacacctactacaacccgtccctcaagagtcgacttaccatctcagtagacacgtctaagaaccagttctccctggagctgacctctgtgagtgccgcggacgcggccgtgttttattgtgcgagatccaagggataccactttgactactggggccagggaagcctggtctccgtctcctcag

SEQ ID NO: 8651 - DNA, 355 bp, Homo sapiens; identical to SEQ ID NO: 8650

SEQ ID NO: 8652 - DNA, 337 bp, Homo sapiens
caggtgcagctgcaggagtcgggcccaggactggtgaagccttcggagaccctgtccctcacctgcactgtctctggtggctccatcagtaattactactggagctggatccggcagcccgccgggaagggactggagtggattgggcttatctataccagtgggagcaccaactacaacccctccctcaagagtcgagtcaccatgtcagtagacacgtccaagaaccagttctccctgaagctgagctctgtgaccgccgcggacacggccgtgtattactgtgcgaggggatttgactactggggccagggaaccctggtcaccgtctcctcag

SEQ ID NO: 8653 - DNA, 337 bp, Homo sapiens
caggtgcagctgcaggagtcgggcccaggactggtgaagccttcggagaccctgtccctcacctgcactgtctctggtggctccatcagtagttactactggagctggatccggcagcccgccgggaagggactggagtggattgggcgtatctataccagtgggagcaccaactacaacccctccctcaagagtcgagtcaccatgtcagtagacacgtccaagaaccagttctccctgaagctgagctctgtgaccgccgcggacacggccgtgtattactgtgcgaggggctttgactactggggccagggaaccctggtcaccgtctcctcag

SEQ ID NO: 8654 - DNA, 337 bp, Homo sapiens
caggtgcagctgcaggagtcgggcccaggactggtgaagccttcggagaccctgtccctcacctgctctgtctctggtgactccatcagtggttactactggagctggatccggcagcccccagggaagggactggagtggattgggtatatctattacagtgggaacaccaactacaacccctccctcaagagtcgagtctccatatcagtagacacgtccaagaaccagttctccctgaagctgagctctgtgactgctgcggacacggccgtatatttctgtgcgagggggttcgacccctggggccagggaatcctggtcaccgtctcctcag

SEQ ID NO: 8655 - DNA, 337 bp, Homo sapiens
caggtgcagctgcaggagtcgggcccaggactggtgaagccttcggagaccctgtccctcacctgcactgtctctggtggttccatcagtagttactactggagctggatccggcagcccccagggaagggactggagtggattgggtatatctattatggtgggagcaccaactacaacccctccctcaagagtcgagtcaccatgtcagtagacacgtccaagaaccagttctccctgaggctgagctctctgaccgctgcggacacggccgtgtattactgtgcgagagggttcgacccctggggccagggaaccctggtcaccgtctcctcag

SEQ ID NO: 8656 - DNA, 358 bp, Homo sapiens
caggtgcagttgctggagtctgggggaggcgtggtccagcctgggaggtccctgagactctcctgtgcagcgtctggattcaccttcaagaactatggcatgcactgggtccgccaggctccaggcaaggggctagaatgggtggcgattatatggtatgatggaaaaaataaatactacacagactccgtgaggggccgattcaccatctccagagacaattccaagaacactttcgatctgcaaatgaacagcctgagagtcgaggacacggctgtgtattactgtgcgagatccccggccaatccttggtacttcgatctctggggccgtggtaccctggtcactgtctcttcag

SEQ ID NO: 8657 - DNA, 358 bp, Homo sapiens
caggtgcagttgctggagtctgggggaggcgtggtccagcctgggaggtccctgagactctcctgtgcagcgtctggattcaccttcaagaattatggcatgcactgggtccgccaggctccaggcaaggggctagaatgggtggcgattatatggtatgatggagtaaataaatattatacagactccgtgaggggccggttcaccatctccagagacaattccaggaacactttcgatctgcaaatgaacagcctgagagtcgaggacacggctgtgtattactgtgcgagatccccggccaatccttggtacttcgatctctggggccgaggtaccctggtcactgtctcttcag

SEQ ID NO: 8658 - DNA, 352 bp, Homo sapiens
caggtgcagctggtgcagtctggggctgaggtgaagaagcctggggcctcagtgaaggtttcctgcaaggcatctggagacaccttcaccagttactatatgcactgggtgcgacaggcccctggacaagggcttgagtggatgggaataatcaaccctagtggcgttagcacaagctacgcacagaagttccagggtagagtcaccatgaccagggacacgtccacgagcacagtctacatggagctgagcagcctgagatctgaggacacggccgtgtattactgtgcctcacttagtggcagctcgtccctctactggggccagggaaccctggtcaccgtctcctcag

SEQ ID NO: 8659 - DNA, 352 bp, Homo sapiens; identical to SEQ ID NO: 8658

SEQ ID NO: 8660 - DNA, 393 bp, Homo sapiens
caggtgcaactggtgcagtctggggctgaggtgaagaagcctggggcctcagtgaaggtttcctgcaaggcatcgggatacaccttcagcagttactatatgcactgggtgcgacaggcccctggacaagggcttgagtggatgggaataatcaaccccagtggtggtagcacaaggtacgcacagaaattccagggcagagtcgccatgaccagggacacgtctacgagcacagtgtacatggagctgagtagcctcagatctgaggacgcggccgtgtattactgtgcgagagatacatattgtggtggtgtctgctattccggtattgtctacaactactattacggtatggatgtctggggccaagggaccacggtcaccgtctcctca

SEQ ID NO: 8661 - DNA, 393 bp, Homo sapiens; identical to SEQ ID NO: 8660

SEQ ID NO: 8662 - DNA, 358 bp, Homo sapiens
caggtgcagctgcaggagtcgggcccaggactggtgaagccttcacagaccctgtccctcacctgcgctgtatctggtggctccatcagcagtggtggttcctactggagctggatccgccagcacccagggaagggcctggagtggattgggtacacctattatagtgggaacacctactacaacccgtccctcaagagtcgagttaccatatcactagacacgtctaagaaccagttctccctgaagctgagctctgtgactgccgcggacacggccgtgtattactgtgcgaggtcctctatggttcggggacttgactactggggccggggaaccctggtcaccgtctcctcag

SEQ ID NO: 8663 - DNA, 358 bp, Homo sapiens; identical to SEQ ID NO: 8662

SEQ ID NO: 8664 - DNA, 355 bp, Homo sapiens
gaggtgcagctggtggagtctgggggaggcttggtccagcctggggagtccctgagactctcctgtgcagcctctggattcacctttagaaccttttggatgcactgggtccgccaggctccagggaaggggctggagtgggtggccaacatgcacccagatggaagtgagatctactatgtggactctgtgaagggccgattcaccatctccagagacaaccgcaagaactcactgtatctgcaaatgaacagcctgagcaccgaggacacggctgtgtattactgtgcggggaccggggtgccatttgcttttgatatctggggccaagggacagtggtcaccgtctcttcag

SEQ ID NO: 8665 - DNA, 355 bp, Homo sapiens; identical to SEQ ID NO: 8664

SEQ ID NO: 8666 - DNA, 349 bp, Homo sapiens
caggtgcagctggtgcagtctggggctgaggtgaagaagcctggggcctcagtgaaggtctcctgcaagccttctggatgaaacttcatcgcctactatatgtactgggtgcgacaggcccctggacaagggcttgagtggatgggctggagcgaccctaagagcggtggcacaaactatgtgcagagattgcaggtcagggtcaccatggcctgggacacgtccatcagcacagcctacttcgactgcgcaggctgacatctgacgacacggccgtctttactgtgcgagaatcactatttgaagtgtgcctcttggggccagggaaccctggtctccgtctcctcag

SEQ ID NO: 8667 - DNA, 349 bp, Homo sapiens
caggtgcagctggtgcagtctggggctgaggtgaagaagcctggggcctcagtgaaggtctcctgcaaggcttctggataaaacttcatcgcctagtatatgtactgggtgcgacaggcccctggacaagggcttgagtggatgggctggagcaaccctaagagcggtggcacaaactatgtacagagattgcaggtcagggtcaccatggcctgggacacgtccatcagcacagcctacttggactgcgcaggctgacatctgacgacacggccgtctttactgtgcgagaatcactatttgaagtgtgcctcttggggccagggaaccctggtcaccgtctcctcag

SEQ ID NO: 8668 - DNA, 352 bp, Homo sapiens
caggtgcagctgcaggagtcgggcccaggactggtgaagccttcggagaccctgtccctcacctgcactgtctctggtggctccatcagtaattactactggaactggatccggcagcccgccgggaagggactggagtggattggacgtatctattccagtgggatcaccaactacaacccctccctcaagagtcgagtcaccatgtcagtggacacgtccaagaaccagttctccctgaagctgagctctgtgaccgccgcggacacggccgtgtattactgtgcgagaggggccagctatgcccattttgactactggggccagggaaccctggtcaccgtctcctcag

SEQ ID NO: 8669 - DNA, 352 bp, Homo sapiens; identical to SEQ ID NO: 8668

SEQ ID NO: 8670 - DNA, 367 bp, Homo sapiens
caggtgcagctgcaggagtcgggcccaggactggtgaagccttcacagaccctgtccctcacctgcactgtctctggtggctccatcagcagtggtgattactactggagttggatccgccagcccccagggaagggcctggagtggattgggtacatctattacagtgggagcacctactacaacccgtccctcaagagtcgagttaccatatcagtagacacgtccaagaaccagttctccctgaagctgagctctgtgactgccgcagacacggccgtgtattactgtgccagagaagccgtaattactatggttcggggagttatatattggggccagggaaccctggtcaccgtctcctcag

SEQ ID NO: 8671 - DNA, 370 bp, Homo sapiens
gaggtgcagctggtggagtctgggggaggcttggtccagccgggggggtccctgagactctcctgtgcagcctctgggttcaccttcagtggctctgctatgcactgggtccgccaggcttccgggaaagggctggagtgggttggccgtattagaagcaaagctgctagttacgcgactgcatatgctgcgtcggttcaaggcagattcaccatctccagagatgattccaacaacacggcatatctgcaaatgagcagcctgacaaccgaggacacggccatatattactgcgctagacggggccgcagcagtggctggcacgaacttgacttttggggccagggaaccccggtcaccgtctcctcag

SEQ ID NO: 8672 - DNA, 364 bp, Homo sapiens
gaggtgcagctggtggagtctgggggaggcctggtcaagcctggggggtccctgagactctcctgtgcagcctctggattcaccttcagtagctatagcatgaactgggtccgccaggctccagggaaggggctggagtgggtctcatccattagtagtagtagtagttacatatactacgcagactcagtgaagggccgattcaccatctccagagacaacgccaagaactcactgtatctgcaaatgaacagcctgagagccgaggacacggctgtgtattactgtgcgagagataagggggattactatggttcgggccgtgactactggggccagggaaccctggtcaccgtctcctcag

SEQ ID NO: 8673 - DNA, 364 bp, Homo sapiens
gaggtgcagctggtggagtctgggggaggcttggtacagcctggggggtccctgagactctcctgtgcagcctctggattcaccttcagtagctatagcatgaactgggtccgccaggctccagggaaggggctggagtgggtttcatacattagtagtagtagtagtaccatatactacgcagactctgtgaagggccgattcaccatctccagagacaatgccaagaactcactgtatctgcaaatgaacagcctgagagacgaggacacggctgtgtattactgtgcgagagatcaactcgggtatagcagtggctggtacgattactggggccagggaaccctggtcaccgtctcctcag

SEQ ID NO: 8674 - DNA, 364 bp, Homo sapiens
caggtgcagctggtggagtctgggggaggcttggtcaagcctggagggtccctgagactctcctgtgcagcctctggattcaccttcagggactactacatgagctggatccgccaggctccagggaaggggctggagtgggtttcatacattagtaatagtggtagcaccatatactacgcagactctgtgaagggccgagtcaccatctccagggataacgccaagaactcactgtatctgcaaatgaacagcctgagagccgaggacacggccgtgtattactgtgcgagagtcaactggaacagagcctcgatctggatcgacccctggggccagggaaccctggtcagcgtctcctcag

SEQ ID NO: 8675 - DNA, 367 bp, Homo sapiens
caggtgcagctgcaggagtcgggcccaggactggtgaagccttcacagaccctgtccctcacctgcactgtctctggtggctccatcagcagtggtggttactactggagctggatccgccagcacccagggaagggcctggagtggattgggtacatctattacagtgggagcacctactacaacccgtccctcaagagtcgagttaccatatcagtagacacgtctaagaaccagttctccctgaagctgagctctgtgactgccgcggacacggccgtgtattactgtgcgagagaggtagtggctggccccgtcaactggttcgacccctggggccagggaaccctggtcaccgtctcctcag

SEQ ID NO: 8676 - DNA, 361 bp, Homo sapiens
caagtgcaactacaccagtggggcgcaggactgttgaggccttcggagaccctgtccctcacctgcggtgtctatggtgggtccttcagtggttactactggacctggatccgccagcccccagggaaggggctggagtggattggggaaatcaatcatactggaagctccacctacaacccgtccctcaagagtcgagtcaccatatcagtggacacgtccaagaaccagttctccctgaaggtgacctctgtgattgccgcggacacggctgtgtattactgtgcgagaggcggtcggaccatggttcggggtggcagtgagtattggggtcagggagccctggtcaccgtctcctcag

SEQ ID NO: 8677 - DNA, 361 bp, Homo sapiens
caggtgcagctgcaggagtcgggcccaggactggtgaagccttcggagaccctgtccctcacctgcagtgtctctggtgactccatcaggaacaactactggagctggttccgtcagtccccagggaagggactggagtggattggttttatctattacagtggagtaagcagttccaattccgccctcagtggtcgagtctccatgtcagtggaccaggccaagaaccagttgtccctgagactgagatctgtgaccgccgcggacacggccgtgtatttttgtgcgaggcatcttaatagggatcttgttccgccgttcgacccctggggccagggaacccttgtcaccgtctcttcag

SEQ ID NO: 8678 - DNA, 361 bp, Homo sapiens
gaggtgcagctggtggagtctggaggaggcttgatccagcctggggggtccctgagactctcctgtgcagcctctgggttcaccgtcagtagcaactacatgagctgggtccgccaggctccagggaaggggctggagtgggtctcagttatttatagcggtggtagcacatactacgcagactccgtgaagggccgattcaccatctccagagacaattccaagaacacgctgtatcttcaaatgaacagcctgagagccgaggacacggccgtgtattactgtgcgagaggtggtatagtgggagctaccatcccctttgactactggggccagggaaccctggtcaccgtctcctcag

SEQ ID NO: 8679 - DNA, 364 bp, Homo sapiens
caggtccacctagtacagtctggggctgaggtgaagaagcctggggcctcagtgaaggtctcctgcaaggtttccggatacaccctcattgaagtacccatgcactgggtgcgacaggctcctggaaaagggcttgagtggatgggaggttttgatcctgaagatggtgaaacaatctacgcacagaagttccagggcagagtcaccatgacggaggacacatctacagacacagcctacatggagctgagcagtctgagatctgaggacacggccgtgtattactgtgcaacagcggctatagtgggagacccccactggttcgacccctggggccagggaaccctggtcaccgtctcctcag

SEQ ID NO: 8680 - DNA, 364 bp, Homo sapiens
caggtccagctggtacagtctggggctgaggtgaagaagcctggggcctcagtgaaggtctcctgcaaggtttccggatacaccctcattgaattatccatgcactgggtgcgacaggctcctggaaaagggcttgagtggatgggaggttttgatcctgaagatggtgaaacaatctacgcacagaagttccagggcagagtcaccatgaccgaggacacatctacagacacagcctacatggagctgagcagcctgagatctgaggacacggccgtctattactgtgcaacagcgcccagtacggtgactacgggctggttcgacccctggggccagggaaccctggtcaccgtctcctcag

SEQ ID NO: 8681 - DNA, 364 bp, Homo sapiens
caggtgcagctggtggagtctgggggagacgtggtccagcctgggaggtccctgagactctcctgtgcagcgtctgggttcaccttcagtagctatggcatgcactgggtccgccaggctccaggcaaggggctggagtgggtggcagttatatggtttgatggcagtaataaatactatgcagactccgtgaggggccgattcaccatctccagagacaattccaagaacacgctgtatctgctaatgaacagcctgagagccgaggacacggctgtatattactgtgcgacagatcatccctttgacaacggtggtaactccgactactggggccagggaaccctggtcaccgtctcctcag

SEQ ID NO: 8682 - DNA, 364 bp, Homo sapiens
caggtgcagctggtggagtctgggggaggcgtggtccagcctgggaggtccctgagactctcctgtgcagcgtctggattcaccttcagtagctatggcatgcactgggtccgccaggctccaggcaaggggctggagtgggtggcagttatatggtatgatggaagtaataaatactatgcagactccgtgaagggccgattcaccatctccagagacaattccaagaacacgctgtatctgcaaatgaacagcctgagagccgaggacacggctgtgtattactgtgcgagaggtcctctctggggttcggccaactggttcgacccctggggccagggaaccctggtcaccgtctcctcag

SEQ ID NO: 8683 - DNA, 364 bp, Homo sapiens
caggtgcagctggtggagtctgggggaggcgtggtccagcctgggaggtccctgagactctcctgtgcagcgtctggattcaccttcagtagctatggcatgcactgggtccgccaggctccaggcaaggggctggagtgggtggcagttatatggtatgatggaagtaataaatactatgcagactccgtgaagggccgattcaccatctccagagacaattccaagaacacgctgtatctgcaaatgaacagcctgagagccgaggacacggctgtgtattactgtgcgagagatctcgtagtagtaccagctgctacgattgactactggggccagggaaccctggtcaccgtctcctcag

SEQ ID NO: 8684 - DNA, 367 bp, Homo sapiens
cagctgcagctgcaggagtccggctcaggactggtgaagccttcacagaccctgtccctcacctgcgctgtctctggtggctccatcagcagtggtggttactcctggagctggatccggcagccaccagggaagggcctggagtggattgggtacatctatcatagtgggaccacctactacaacccgtccctcaagagtcgagtcaccatatcagtagacaggtccaagaaccacttctccctgaagctgagctctgtgaccgccgcggacacggccgtgtattactgtgccagagcgtgggacagcagctggtatatctactttgactactggggccagggaaccctggtcaccgtctcctcag

SEQ ID NO: 8685 - DNA, 366 bp, Homo sapiens
cagctgcagctgcaggagtccggctcaggactggtgaagccttcacagaccctgtccctcacctgcgctgtctctggtggctccatcagcagtggtggttactcctggagctggatccggcagccaccagggaagggcctggagtggattgggtacatctatcatagtgggagcacctactacaacccgtccctcaagagtcgagtcaccatatcagtagacaggtccaagaaccagttctccctgaagctgagctctgtgaccgccgcggacacggccgtgtattactgtgccagaggcgtgggctcgaaagcctactactacatggacgtctggggcaaagggaccacggtcaccgtctcctca

SEQ ID NO: 8686 - DNA, 364 bp, Homo sapiens
gaggtgcagctggtggagtctgggggaggcttggtccagcctggggggtccctgagactctcctgtgcagcctctggattcacctttagtagctattggatgagctgggtccgccaggctccagggaaggggctggagtgggtggccaacataaagcaagatggaagtgagaaatactatgtggactctgtgaagggccgattcaccatctccagagacaacgccaagaactcactgtatctgcaaatgaacagcctgagagccgaggacacggctgtgtattactgtgcgagagattccgctgctatctacccctgctgtatggacgtctggggcaaagggaccacggtcaccgtctcctcag

SEQ ID NO: 8687 - DNA, 356 bp, Homo sapiens
tgcagctgcaggaatcgggcccagcacgggtgaagtcttcggacaccctggccctcacctgcagcgtctctggtggctccattattggttattattggagttggatccggcagcccgccgggaaggacctggagtggattggccatgtctcttccagtggcgacaccaattataggccctccctcaagggtcgagtcaccatgtcagtagacacgtcgaagagccaattctccctgaggctgacctctgtgaccgccgcggacacggccctttattactgtgcgagaattttgaagacctactccggcactttcatcgacgtctggggcaaagggaccacggtcaccgtctcctca

SEQ ID NO: 8688 - DNA, 370 bp, Homo sapiens
caggtgcagctggtggagtctgggggaggcgtggtccagcctgggaggtccctgagactctcctgtgcagcctctggattcgccttcagtgcctatgctgtgcactgggtccgccaggctccaggcaaggggctggagtgggtggcacttatatcatatgatggaagcaataaatactacgcagcctccgtgaggggccgattcaccatctccagagacaattccaagaacacgctgtatctgcaaatgaacagcctgagagctgaggacacggctgtgtatttctgcgcgagagattatagttgtagtagtaccagctgctatggaattgactactggggccagggaaccctggtcaccgtctcctcag

SEQ ID NO: 8689 - DNA, 367 bp, Homo sapiens
cagctgcagctgcaggagtcgggcccaggactggtgaagccttcggagaccctgtccctcacctgcactgtctctggtgactccatcagcagtagtatttactactggggctggatccgccagcccccagggaaggggctggagtggattgggagtatctattatagtgggagcacctactacaacccgtccctcaagagtcgagtcaccatatccatagacacgtccaagaaccagttctccctgaagctgagctctgtgaccgccgcagacacggctgtgtattactgtgcgaggccggccctgggcagtggctggaaaccttttgactactggggccagggaaccctggtcaccgtctcctcag

SEQ ID NO: 8690 - DNA, 367 bp, Homo sapiens
cagctgcagctgcaggagtcgggcccaggtctggtgaagccttcggagaccctgtccctcacctgcactgtctctggtggctccatcagcagtagtcgttactattggggctggatccgccagcccccagggaaggggctggagtggattgggaatatctattatagtgggactacctactacaacccgtccctcaagagtcgagtcaccatatccgtagacacgtccaagaaccagttctccctgaagctgagttctgtgaccgccgcagacacggctgtctattactgtgcgagacgtaatgtagttcacgattttggctggttcgacccctggggccagggaaccccggtcaccgtctcctcag

SEQ ID NO: 8691 - DNA, 367 bp, Homo sapiens
cagctgcagctgcaggagtcgggcccaggactggtgaagccttcggagaccctgtccctcacctgcactgtctctggtggctccatcagcagtagtagttactactggggctggatccgccagcccccagggaaggggctggagtggattgggagtatctattatagtgggagcacctactacaacccgtccctcaagagtcgagtcaccatatccgtagacacgtccaagaaccagttctccctgaagctgagctctgtgaccgccgcagacacggctgtgtattactgtgcgagacatcggcagtggttattactagactactttgactactggggccagggaaccctggtcaccgtctcctcag

SEQ ID NO: 8692 - DNA, 364 bp, Homo sapiens
caggtgcagctggtggagtctgggggaggcgtggtccagcctgggaggtccctgagactctcctgtgcagcctctggattcaccttcagtaactatggcatgcactgggtccgccaggctccaggcaaggggctggagtgggtggcaattatatcatttgatggaaattataaatactatgcagactccgtgaagggccgattcaccatctccagagacaattccaaaaacacgctgtatctgcaaatgaacagcctgagaggtgaggacacggctgtgtatttctgtgcgaagaggctcaggaactatgaaaatagtggcctcgactactggggccagggaaccctggtcaccgtctcctcag

SEQ ID NO: 8693 - DNA, 364 bp, Homo sapiens
caggtgcagctggtggagtctgggggaggcgtggtccagcctgggaggtccctgagactctcctgtgcagcctctggattcacctccagtagctatgctatgcactgggtccgccaggctccagacaaggggctagagtgggtggcagttatatcatatgatggaaacaataaatactacgcggactccgtgaggggccgatttatcatctccagagacaattccaagaacacactatatctgcaaatgaacggcctgagagctgaggacacggctgtgtattactgtgcgagagactctagtgggagctactatgggctctttgactactggggccagggaaccctggtcaccgtctcctcag

SEQ ID NO: 8694 - DNA, 364 bp, Homo sapiens
caggtgcagctggtggagtctgggggaggcgtggtccagcctgggaggtccctgagactctcctgtgcagcctctggattcaccttcgatagttatggaatgtactgggtccgccaggccccaggcaaggggctggagtgggtggcagtcatttcatatgatggaagtaataaatactacgcagactcggtgaagggccgattcaccgtctccagagacagttccaggaacacgctgtatctgcaaatgaacagcctgagagctgaggacacggctgtgtattactgtgcgaggccccttagtggttcttactttgggtcctttgactactggggccagggaaccctggtcaccgtctcctcag

SEQ ID NO: 8695 - DNA, 364 bp, Homo sapiens
caggtgcagctggtggagtctgggggaggcgtggtccagcctgggaggtccctgagactctcctgtgcagcctctggattcaccttcagtacctatgctatgcactgggtccgccaggctccaggcaaggggctggagtgggtggcggttatttcatatgatggaagcaataaatactacgcagactccgtgaagggccgattcaccatctccagagacaattccaagaacaccctgtatctgcaatggaacagcctgagagctgaggacacggctgtatattactgtgcgagatcagcgtcggggagttattatagctggttcgacccctggggccagggaaccctggtcaccgtctcctcag

SEQ ID NO: 8696 - DNA, 373 bp, Homo sapiens
cagctgcagctgcaggagtcgggcccaggactggtgaagccttcggagaccctgtccctcacctgcactgtctctggtggctccatcagcagtagtttttactactggggctggatccgccagcccccagggaaggggctggagtggattgggaatatctattatagtgggagcacctactacaacccgtccctcaagagtcgagtcaccatatccgtagacacgtccaagaaccagttctccctgaagctgagctctgtgaccgccgcagacacggctgtgtattactgtgcgaccaaagcgaactatgattatagtggttattactactttgactactggggccagggaaccctggtcaccgtctcctcag

SEQ ID NO: 8697 - DNA, 373 bp, Homo sapiens
cagctgcagctgcaggagtcgggcccaggactggtgaagccttcggagaccctgtccctcacctgcactgtctctggtggctccatcagcagtagtagttactactggggctggatccgccagcccccagggaaggggctggagtggattgggagtatctattatagtgggagcacctactacaacccgtccctcaagagtcgagtcaccatatccgtagacacgtccaagaaccagttctccctgaagctgagctctgtgaccgccgcagacacggctgtgtattactgtgcgagctttttggagtggttattagttggccagtactactttgactactggggccagggaaccctggtcaccgtctcctcag

SEQ ID NO: 8698 - DNA, 370 bp, Homo sapiens
caggtgcagctggtggagtctgggggaggcgtggtccagcctgggaggtccctgagactctcctgtgcagcgtctggatttaccttcagtagctatggcatgcactgggtccgccaggctccaggcaaggggctggagtgggtggcagttatttggtatgatggaagtaataaatactatgcagactccgtgaagggccgattcaccatctccagagacaattccaagaacacgctatatttgcaaatgaacagcctgacagccgacgacacggctgtgtattactgtgcgagaatgcgtatagatggctacaattttatattcgattttgactactggggccagggaaccctggtcaccgtctcctcag

SEQ ID NO: 8699 - DNA, 363 bp, Homo sapiens
gaggtgcagctggtggagtctgggggaggcctggtcaagcctggggggtccctgagactctcctgtgcagcctctggattcaccttcagtagctatagcatgaactgggtccgccaggctccagggaaggggctggagtgggtctcatccattagtagtagtagtagttacatatactacgcagactcagtgaagggccgattcaccatctccagagacaacgccaagaactcactgtatctgcaaatgaacagcctgagagccgaggacacggctgtgtattactgtgcgagagactctgtttactactactactacggtatggacgtctggggccaagggaccacggtcaccgtctcctca

SEQ ID NO: 8700 - DNA, 361 bp, Homo sapiens
gaagtgcagctggtggagactggaggaggcttgatccagcctggggggtccctgagactctcctgtgcagcctctgggttcaccgtcagtagcaactacatgagctgggtccgccaggctccggggaaggggctggagtgggtctcaattatttatagcggtggtagtacatactacgcagactccgtgaagggccgattcaccatctccagagacaattccaagaacacgctgtatcttcaaatgaacagcctgagagccgaggacacggccgtgtattactgtgcgagagatctccgaagtggctgggggtatgcttttgatatctggggccaagggacaatggtcaccgtctcttcag

SEQ ID NO: 8701 - DNA, 378 bp, Homo sapiens
caggtgcagctggtggaatctgggggaggcttggtcaagcctggagggtccctgagactctcctgtgcagcctctggattcagtctcagtgaccactacatgagctggatccgccaggctccagggaaggggctggagtggatttcatacattcgtggtagtggtattagtactagtgatagttccatatactacgcagactctgtgaagggccgattcaccatctccagggacaacgcccagaactcattgtttctgcaaatgaataccctgagagccgaggacacggccgtctattactgtgcgagagaccggaggccctcccagtacatcggtctggacgtctggggccaagggaccacggtcaccgtctcctca

SEQ ID NO: 8702 - DNA, 370 bp, Homo sapiens
gaggtgcagctggtgcagtctggagcagaggtgaaaaagcccggggagtctctgaagatctcctgtaagggttctggatacagctttaccagctactggatcggctgggtgcgccagatgcccgggaaaggcctggagtggatggggatcatctatcctggtgactctgataccagatacagcccgtccttccaaggccaggtcaccatctcagccgacaagtccatcagcaccgcctacctgcagtggagcagcctgaaggcctcggacaccgccatgtattactgtgcgagagtcggacgaggcagtggctggtacgtgggcacttttgactactggggccagggaaccctggtcaccgtctcctcag

SEQ ID NO: 8703 - DNA, 367 bp, Homo sapiens
caggtgcagctacagcagtggggcgcaggactgttgaagccttcggagaccctgtccctcacctgcgctgtctatggtgggtccttcagtggttactactggagctggatccgccagcccccagggaaggggctggagtggattggggaaatcaatcatagtggaagcaccaactacaacccgtccctcaagagtcgagtcaccatatcagtagacacgtccaagaaccagttctccctgaagctgagctctgtgaccgccgcggacacggctgtgtattactgtgcgagaaggcgggattactatggttcggggagttattatatggacgtctggggcaaagggaccacggtcaccgtctcctcag

SEQ ID NO: 8704 - DNA, 367 bp, Homo sapiens
caggtgcagctgcaggagtcgggcccaggactggtgaagccttcggagaccctgtccctcacctgcactgtctctggtggctccatcagtagttactactggagctggatccggcagcccccagggaagggactggagtggattgggtatatctatgacagtgggagcaccaactacaacccctccctcaagagtcgagtcaccatatcagtagacacgtccaagaagcagttctccctgaagctgagctctgtgaccgccgcagacgcggccgtgtattactgtgcgagagaaagtcaatatagcagtggctactatgggtaccctgactgctggggccagggaatcctggtcaccgtctcctcag

SEQ ID NO: 8705 - DNA, 367 bp, Homo sapiens
caggtgcagctgcaggagtcgggcccaggactggtgaagccttcggagaccctgtccctcacctgcactgtctctggtggctccatcagtagttactactggagctggatccggcagcccccagggaagggactggagtggattgggtatatctattacactgggagcaccaactaccacccctccctcaagagtcgagtcaccatatcagtagacacgtccaagaaccaaatctccctgaggctgagctctgtgaccgctgcggacacggccgtgtattactgtgcgagagatctttcgaactatgatagtagtgcatacgtctgggcctactggggccagggaaccctggtcaccgtctcctcag

SEQ ID NO: 8706 - DNA, 364 bp, Homo sapiens
gaggtgcagctgttggagtctgggggaggcttggtacagcctggggggtccctgagactctcctgtgcagcctctggattcacctttagcagctatgccatgagctgggtccgccaggctccagggaaggggctggagtgggtctcagctattagtggtagtggtggtagcacatactacgcagactccgtgaagggccggttcaccatctccagagacaattccaagaacacgctgtatctgcaaatgaacagcctgagagccgaggacacggccgtatattactgtgcgaaagatacttacaccagaccgacagcgtactttgactactggggccagggaaccctggtcaccgtctcctcag

SEQ ID NO: 8707 - DNA, 364 bp, Homo sapiens
gaggtgcagctgttggagtctgggggaggcttggtaaagcctggggggtccctgagactctcctgtgcagcctctggattcacctttagcagctatgccatgaactgggtccgccaggctccagggaaggggctgcagtgggtctcagctattagtggtagtggtgataccacatactacgcagactccgtgaggggccggttcaccttctccagagacaattccaagaacacgctgtatctgcaaatgaacagcctgagagccgaggacacggccgtatattactgtgcgaaagatcggtggttatactcaggggcgcactttgactactggggccagggaaccctggtcaccgtctcctcag

SEQ ID NO: 8708 - DNA, 364 bp, Homo sapiens
gaggtgcagctgttggagtctgggggaggcttggtccaacctggggggtccctgagactctcctgcgcagcctctggattcacctttagcgactatgccatggcttgggtccgccagtttccagggaagggactggagtgggtctcatctattcatggcagtggtgatgtcacacactacgcagactccgtgaagggccggttctccatctccagagacaattccaaggacacagtttatctggacatgagtagcctgagagccggggacacggccacatattactgtgcgaaggatactcgagggtacggtggacacgactttgacaactggggccagggaaccctggtcaccgtctcctcag

SEQ ID NO: 8709 - DNA, 364 bp, Homo sapiens
gaggtgcagttgttggagtctgggggaggcttggtgcagcctggggggtccctgagactctcctgtgcagcctctggattcacctttagcagctatgccatgacctgggtccgccaggctccagggaaggggctggagtgggtctcaattattagtgatagtggtggtagcgcatactacgcagactccgtgaagggccggttcaccatgtccagagacaattccaagaacacactgtatctgcaaatgaacagcctgagagccgaggacacggccgtatattactgtgcgaaacttcagtgggagctgcctgcggggtactttgactactggggccagggaaccctggtcaccgtctcctcag

SEQ ID NO: 8710 - DNA, 364 bp, Homo sapiens
gaggtgcagctgttggactctgggggaggcttggtacagcctggggggtccctgagactctcctgtgcagcctctggattcacctttagcacctatgccttgacctggctccgccaggctccagggaaggggctggagtgggtctcaggtattagtggtaggggtgatcctacattctacgcagattccgtgaagggccggttcatcatctccagagacaattccgagaacaccctgtatctgcaaatgaacaacctgagagccgaggacacggccgtatattactgtgcgaagggtcgagtatcaactagtatgtcgtcttttgactactggggccagggaaccctggtcaccgtctcctcag

SEQ ID NO: 8711 - DNA, 361 bp, Homo sapiens
caggtgcagctgcaggagtcgggcccaggactggtgaagccttcggagaccctgtccctcacctgcactgtcgctggtgcctccatcagtaattactactggagctggatccggcagcccccagggaggggactggagtggattgggtatgtctactacagtgggagcaccaactacaagccctccctcaagagtcgagtcaccatgtcagtagacacgtccaagaaccagttctccctgaagctgagctctgtgaccgctgcggacacggccgtgtattactgtgcgagagcaaggtataccaacagctggtacgcttttgatatctggggccaagggacaacggtcaccgtctcttcag

SEQ ID NO: 8712 - DNA, 361 bp, Homo sapiens
caggtgcagctgcaggagtcgggcccaggactggtgaagccttcggagaccctgtccctcacctgcactgtctctggtggctccatcagtagttactactggagctggatccggcagcccccagggaagggactggagtggattgggtatatctattacagtgggagcaccaactacaacccctccctcaagagtcgagtcaccatatcagtagacacgtccaagaaccagttctccctgaagctgagctctgtgaccgccgcagacacggccgtgtattactgtgcgagacatgcagggttccccgttgtgagtgcttttgatatctggggccaagggacaatggtcaccgtctcttcag

SEQ ID NO: 8713 - DNA, 369 bp, Homo sapiens
gaggtgcagctggtggagtccgggggaggcttagttcagcctggggggtccctgagactctcctgtgcagtctctggattcaccttcagtagttactggatgcactgggtccgccaagctccagggaaggggctggtgtgggtctcacgtattgatagtgatggcagtagtacaacctacgcggactccgtgaagggccgattcaccatctccagagacaacgccaagaacacgctgtatctcctcatgaacagtctgagagtcgaggacacggctgtgtattactgtgcaagagatcccccccgggctggttattatgactacgctatggacgtctggggccaagggaccacggtcaccgtctcctca

SEQ ID NO: 8714 - DNA, 363 bp, Homo sapiens
caggtgcagctggtggagtctgggggaggcgtggtccagcctgggaggtccctgagactctcctgtgcagcctctggattcaccttcactggctatgctatgcactgggtccgccaggctccaggcaaggggctggagtgggtggcagttatttcatatgatggaaacaataaatactacgcagagtccgtgaagggccgattcaccatctccagagacaattccaagaacacgctgtatctgcaaatgagcagcctgagagctgaggacacggctgtgtattactgtgcgagatctgctagtgggaattactactactacatggacgtctggggcgtggggaccacggtcaccgtctcctca

SEQ ID NO: 8715 - DNA, 364 bp, Homo sapiens
caggtgcagctggtggagtctgggggaggcgtggtccagcctgggatgtccctgagactctcctgtgcagcctctggattcaccttcagtaattatgctatgtactgggtccgccaggctccaggcaaggggctggagtgcatggtagttatatcatatgatggaagcaataaatactacgcagactccgtgaagggccgattcaccatctccagagacaattccaagaacacgctgtatctgcaaatgaacagcctgagagctgaggacacggctgtgtattactgtgcgaaaacacgcggtgggaactactttgatgcttttgatatctggggccaagggacaatggtcaccgtctcttcag

SEQ ID NO: 8716 - DNA, 364 bp, Homo sapiens
caggtgcagctggtggagtctgggggaggcgtggtccggcctggggggtccctgagactctcctgtgcagcctctggattcaccttcagtacccatgctatgtactgggtccgccaggctccaggcaaggggctggagtgggtggcaattatatcatatgatggaggcaataaatactacgcagactccgtgaagggccgattcaccatctccagagacaattctaagaacacgctatatctgcaaatgaacagcctgagacctgaggacacggctgttttttactgtgcgagagttcggggtgggaactactacggggcttttgatatctggggccaagggtcaatggtcaccgtctcttcag

SEQ ID NO: 8717 - DNA, 369 bp, Homo sapiens
caggtgcagctggtggagtctgggggaggcgtggtccagcctgggaggtccctgagactctcctgtgcagcctctggattcaccttcagtagctatggcatgcactgggtccgccaggctccaggcaaggggctggagtgggtggcagttatatcatatgatggaagtcataaatactatgcagactccgtgaagggccgattcaccatctccagagacaattccaagaacacgctgtatctgcaaatgaacagcctgagagctgaggacacggctgtgtattactgtgcgaaagtggctgctacttattactactactactacggtatggacgtctggggccaagggaccacggtcaccgtctcctca

SEQ ID NO: 8718 - DNA, 364 bp, Homo sapiens
caggtgcagctggtggagtcggggggaggcgtggtccaccctgggaggtccctgagactctcctgtgcagcctctggattcaccttcagtacctatggcatgcactgggtccgccaggctccaggcaagaggctggagtgggtggcacttatatcatttgatggaactaataaatactatgcagactccgtgaagggccgattcaccatctccagagacaattccaacaacacgctctatctgcaaatgaacagcctgagagctgaggacacggctgtgtattactgtgcgaagtctcaaagtgggggctactatagcgcttttgatatctggggccaagggacaatggtcaccgtctcttcag

SEQ ID NO: 8719 - DNA, 369 bp, Homo sapiens
caggtgcagctggtgcagtctggggctgaggtgaagaagcctggggcctcagtgaaggtctcctgcaaggcttctggatacaccttcaccggctactatatgcactgggtgcgacaggcccctggacaagggcttgagtggatgggatggatcaaccctaacagtggtggcacaaactatgcacagaagtttcagggcagggtcaccatgaccagggacacgtccatcagcacagcctacatggagctgagcaggctgagatctgacgacacggccgtgtattactgtgcgagagtaggtggttaccagcatcactactactacggtatggacgtctggggccaagggaccacggtcaccgtctcctca

SEQ ID NO: 8720 - DNA, 372 bp, Homo sapiens
caggtgcagctgcaggagtcgggcccaggactggtgaagccttcacagaccctgtccctcacctgcactgtctctggtggctccatcagcagtggtggttactactggagctggatccgccagcacccagggaagggcctggagtggattgggtacatctattacagtgggagcacctactacaacccgtccctcaagagtcgagttaccatatcagtagacacgtctaagaaccagttctccctgaagctgagctctgtgactgccgcggacacggccgtgtattactgtgcgagagggctagtgggagccggctactactactactacatggacgtctggggcaaagggaccacggtcaccgtctcctca

SEQ ID NO: 8721 - DNA, 372 bp, Homo sapiens
caggtgcagctgcaggagtcgggcccaggactggtgaagccttcacagaccctgtccctcacctgcactgtctctggtggctccatcagcagtggtggttactactggagctggatccgccagcacccagggaagggcctggagtggattgggtacatctattacagtgggagcacctactacaacccgtccctcaagagtcgagttaccatatcagtagacacgtctaagaaccagttctccctgaagctgagctctgtgactgccgcggacacggccgtgtattactgtgcgagagactccaggggggataactactactactactacatggacgtctggggcaaagggaccacggtcaccgtctcctca

SEQ ID NO: 8722 - DNA, 375 bp, Homo sapiens
gaggtgcagctggtggagtctgggggaggcttggtaaagcctggggggtcccttagactctcctgtgcagcctctggattcactttcagtaacgcctggatgagctgggtccgccaggctccagggaaggggctggagtgggttggccgtagtaaaagcaaaactgatggtgggacaacagactacgctgcacccgtgaaaggcagattcaccatctcaagagatgattcaaaaaacacgctgtatctgcaaatgaacagcctgaaaaccgaggacacagccgtgtattactgtaatacaggagccacgatagaagccacctactactactacatggacgtctggggcaaagggaccacggtcaccgtctcctca

SEQ ID NO: 8723 - DNA, 367 bp, Homo sapiens
caggtgcagctgcaggagtcgggcccaggactggtgaagccttcggagaccctgtccctcacctgcactgtctctggtggctccatcactagttactactgcaactggatccggcagcccgccgggaagggactggagtggattgggcgtatctttagtagtgggaccaccaactacaacccctccctcaggagtcgagtcaccatgtcagtagacacgtccaagaaccagttctccctgaagctgacctctgtgaccgccgcggacacggccgtgtattactgtgcgagagattgggtgtatagcagcagctggtacgccgcgttcgacccctggggccagggaaccctggtcaccgtctcctcag

SEQ ID NO: 8724 - DNA, 369 bp, Homo sapiens
caggtgcagctggtggagtctgggggaggcgtggtccagcctgggaggtccctgagactctcctgtgcagcgtctggattcaccttcagtagctatggcatgcactgggtccgccaggctccaggcaaggggctggagtgggtggcagttatatggtatgatggaagtaataaatactatgcagactccgtgaagggccgattcaccatctccagagacaattccaagaacacgctgtatctgcaaatgaacagcctgagagccgaggacacggctgtgtattactgtgcgagagatcgggaactactcctctactactactactacatggacgtctggggcaaagggaccacggtcaccgtctcctca

SEQ ID NO: 8725 - DNA, 367 bp, Homo sapiens
caggtgcagctgcaggagtcgggcccaggactggtgaagccttcggagaccctgtccctcacctgcactgtctctggtggctccatcagtagttactactggagctggatccggcagcccccagggaagggactggagtggattgggtatatctattacagtgggagcaccaactacaacccctccctcaagagtcgagtcaccatatcagtagacacgtccaagaaccagttctccctgaagctgagctctgtgaccgctgcggacacggccgtgtattactgtgcgagagggggggatttttggagtggtaaccctaactggttcgacccctggggccagggaaccctggtcaccgtctcctcag

SEQ ID NO: 8726 - DNA, 367 bp, Homo sapiens
caggtgcagctgcaggagtcgggcccaggactggtgaagccttcggagaccctgtccctcacctgcactgtctctggtggctccatcagtagttactactggagctggatccggcagcccccaggaaagggactggagtggattgggtatatctattacagtgggagcaccagctacaacccctccctcaagagtcgagtcaccatatcagtagacacgtccaagaaccagttctccctgaagctgagctctgtgaccgctgcggacacggccgtgtattactgtgcgagagcgggggaacaactacgtaccaaggacaactggttcgacccctggggccagggaaccctggtcaccgtctccacag

SEQ ID NO: 8727 - DNA, 360 bp, Homo sapiens
caggtgcagctgcaggagtcgggcccaggactggtgaagccttcggagaccctgtccctcacctgcactgtctctggtggctccatcaggggttactactggagctggatccggcagcccccagggaagggactggagtggattgggtatatttattacagtgggagcaccaactacaacccctccctcgagagtcgagtcaccatatcagtagacacacccaagaaccagttctccctgaaggtgagctctgtgaccgccgcagacacggccgtgtattactgtgcgagatatgccctagggtggctgcagggcggtatggacgtctggggccaagggaccacggtcaccgtctcctca

SEQ ID NO: 8728 - DNA, 360 bp, Homo sapiens
caggtgcagctgcaggagtcgggcccaggactggtgaagccttcggagaccctgtccctcacctgcactgtctctggtggctccatcagtagttactactggagctggatccggcagcccccagggaagggactggagtggattgggtatagatattacagtgggagcaccaattataactcctccctcaagagtcgagtcaccatatcagtagacacgtccaagaaccagttctccctgaagctgaggtctgtgaccgctgcggacacggccgtgtattactgtgcgagaggggtggaaagcttccactactactacatggacgtctggggcaaagggaccacggtcaccgtctcctca

SEQ ID NO: 8729 - DNA, 369 bp, Homo sapiens
caggtccagctggtgcagtctggggctgaggtgaagaagcctgggtcctcggtgaaggtctcctgcaaggcttctggaggcaccttcagcagctatgctatcagctgggtgcgacaggcccctggacaagggcttgagtggatgggaaggatcatccctatccttggtatagcaaactacgcacagaagttccagggcagagtcacgattaccgcggacaaatccacgagcacagcctacatggagctgagcagcctgagatctgaggacacggccgtgtattactgtgcgagagatgacaccccttattactactactactacggtatggacgtctggggccaagggaccacggtcaccgtctcctca

SEQ ID NO: 8730 - DNA, 369 bp, Homo sapiens
caggtccagctggtgcagtctggggctgaggtgaagaagcctgggtcctcggtgaaggtctcctgcaaggcttctggaggcaccttcagcagctatgctatcagctgggtgcgacaggcccctggacaagggcttgagtggatgggaaggatcatccctatccttggtatagcaaactacgcacagaagttccagggcagagtcacgattaccgcggacaaatccacgagcacagcctacatggagctgagcagcctgagatctgaggacacggccgtgtattactgtgcgagagattcaaaccccttttggagcaacccctacggtatggacgtctggggccaagggaccacggtcaccgtctcctca

SEQ ID NO: 8731 - DNA, 367 bp, Homo sapiens
caggtgcagctgcaggagtcgggcccagaactggtgaagccttcggagaccctgtccctcacctgcactgtctctggtggctccatcagtagttactactggagctggatccggcagcccgccgggaagggactggaggggattggacgtatctataccagtgggagcaccaactacaacccctccctcaagagtcgagtcaccatgtcagtagacacgtccaaaaaccagttctccctgaagctgagctctgtgaccgccgcggacacggccgtgtattattgtgcgagagattctggacgatatagtgggaactaccaaggctttgactactggggccagggaaccctggtcaccgtctcctcag

SEQ ID NO: 8732 - DNA, 373 bp, Homo sapiens
caggtgcagctgcaggagtcgggcccaggactggtgaagccttcacagaccctgtccctcacctgcactgtctctggtggctccatcagcagtggtggttactactggagctggatccgccagcacccagggaagggcctggagtggattgggtacatctattacagtgggagcacctactacaacccgtccctcaagagtcgagttaccatatcagtagacacgtctaagaaccagttctccctgaagctgagctctgtgactgccgcggacacggccgtgtattactgtgcgagagatgtgggggtagtaccagcaaccccctatgcttttgatatctggggccaagggacaatggtcaccgtctcttcag

SEQ ID NO: 8733 - DNA, 369 bp, Homo sapiens
caggtgcagctggtggagtctgggggaggcttggtcaagcctggagggtccctgagactctcctgtgcagcctctggattcaccttcagtgactcctacatgagctggatccgccaggctccagggaagggactggagttgatttcatacattagtcatagtggtgcttccaaatactacgcagactctgtgaagggccgattcaccatctccagggacaacgccaggaactcactgtatctggaaatgaacagcctaagagccgaggacacggccgtatattactgtgcgagagtgtgtggtggtagatgctactacttttacggtatggacgtctggggccaggggaccacggtcaccgtcttctca

SEQ ID NO: 8734 - DNA, 367 bp, Homo sapiens
caggtgcagctacagcagtggggcgcaggactgttgaagccttcggagaccctgtccctcacctgcgctgtctatggtgggtccttcagtggttactactggagctggatccgccagcccccagggaaggggctggagtggattggggaaatcaatcatagtggaagcaccaactacaacccgtccctcaagagtcgagtcaccatatcagtagacacgtccaagaaccagttctccctgaagctgagctctgtgaccgccgcggacacggctgtgtattactgtgcgagaggggatagcagcagctgggtaacgcgaggatacttccagcactggggccagggcaccctggtcaccgtctcctcag

SEQ ID NO: 8735 - DNA, 390 bp, Homo sapiens
caggtgcagctgcaggagtcgggcccaggactggtgaagccttcacagaccctgtccctcacctgcactgtctctggtggctccatcagcagtggtggttactactggagctggatccgccagcacccagggaagggcctggagtggattgggtacatctattacagtgggagcacctactacaacccgtccctcaagagtcgagttaccatatcagtagacacgtctaagaaccagttctccctgaagctgagctctgtgactgccgcggacacggccgtgtattactgtgcgagagaacggggggatagcagcagctggtacccagcttactactactactacggtatggacgtctggggccaagggaccacggtcaccgtctcctca

SEQ ID NO: 8736 - DNA, 387 bp, Homo sapiens
gaggtgcagctggtggagtctgggggaggcctggtcaagcctggggggtccctgagactctcctgtgcagcctctggattcaccttcagtagctatagcatgaactgggtccgccaggctccagggaaggggctggagtgggtctcatccattagtggtagtcgtacttacatatactacgcagactcagtgaagggccgattcaccatctccagagacaacgccaagaactcattgtatctgcaaatgaacagcctgagagccgaggacacggctgtgtattactgtgcgagagaggattatattgtagtagtaccagctgctacagtaggctactactacggtatggacgtctggggccaagggaccacggtcaccgtctcctca

SEQ ID NO: 8737 - DNA, 384 bp, Homo sapiens
caggtgcagctgcaggagtcgggcccaggactggtgaagccttcggagaccctgtccctcacctgcactgtctctggtggctccatcagtagttactactggagctggatccggcagcccgccgggaagggactggagtggattgggcgtatctataccagtgggagcaccaactacaacccctccctcaagagtcgagtcaccatgtcagtagacacgtccaagaaccagttctccctgaagctgagctctgtgaccgccgcggacacggccgtgtattactgtgcgagggaggtgagttgtagtagtaccagctgctatacgggctactactactactacatggacgtctggggcaaagggaccacggtcaccgtctcctca

SEQ ID NO: 8738 - DNA, 384 bp, Homo sapiens
caggtgcagctgcaggagtcgggcccaggactggtgaagccttcggagaccctgtccctcacctgcactgtctctggtggctccatcagtagttactactggagctggatccggcagcccgccgggaagggactggagtggattgggcgtatctataccagtgggagcaccaactacaacccctccctcaagagtcgagtcaccatgtcagtagacacgtccaagaaccagttctccctgaagctgagctctgtgaccgccgcggacacggccgtgtattactgtgcgagagatctgggatattgtagtagtaccagctgttcccactactactactactacatggacgtctggggcaaagggaccacggtcaccgtctcctca

SEQ ID NO: 8739 - DNA, 367 bp, Homo sapiens
caggtgcagctacagcagtggggcgcaggactgttgaagccttcggagaccctgtccctcacctgcgctgtctatggtgggtccttcagtggttactactggagctggatccgccagcccccagggaaggggctggagtggattggggaaatcaatcatagtggaagcaccaactacaacccgtccctcaagagtcgagtcaccatatcagtagacacgtccaagaaccagttctccctgaagctgagctctgtgaccgccgcggacacggctgtgtattactgtgcgagactgaggaacttttggagtggtaatcaagggtggttcgacccctggggccagggaaccctggtcaccgtctcctcag

SEQ ID NO: 8740 - DNA, 367 bp, Homo sapiens
caggtgcagctacagcagtggggcgcaggactgttgaagccttcggagaccctgtccctcacctgcgctgtctatggtgggtccttcagtggttactactggagctggatccgccagcccccagggaaggggctggagtggattggggaaatcaatcatagtggaagcaccaactacaacccgtccctcaagagtcgagtcaccatatcagtagacacgtccaagaaccagttctccctgaagctgagctctgtgaccgccgcggacacggctgtgtattactgtgcgagagctcgtattactatgataaggccgtacgggtggttcgacccctggggccagggaaccctggtcaccgtctcctcag

SEQ ID NO: 8741 - DNA, 396 bp, Homo sapiens
caggtacagctgcagcagtcaggtccaggactggtgaagccctcgcagaccctctcgctcacctgtgccatctccggggacagtgtctctgccaacagcgctgcttggcactggctcaggcagtccccatcgagaggccttgagtggctgggaaggacatactacaagtccaagtggtttaatgattatgcagtatctgtgagaagtcgaatgaccatcaacccagacacatcgaagaaccagttctccctgcagttgaagtctgtgactcccgaggacacggctatatattactgtgcaagaggccgaggtgattatagtgggagcccagacattggccactactactactacatggacgtctggggcaaagggaccacggtcaccgtctcctca

SEQ ID NO: 8742 - DNA, 390 bp, Homo sapiens
cagttgcagctacaggagtcgggcccaggactggcgaagccttcggagaccctgtccctcacctgcactgtctctgatggctccattagcagtgctgattatttctggggctggatccgccaacccccagaaaaggggctggagtggattgggagtatctcttatagtgggtatacctactacaacccgtccctcaagagtcgggtcaccatatccgtagacacgtccaagaatcaattctccctgaagttgagctctgtgaccgccgcagacatgggtgtgtattactgtgcgagacacccgcgaaagtacaggacttcggcgacaggtaactaccaccattattatatggacgtctggggcaaagggaccacggtcaccgtctcctca

SEQ ID NO: 8743 - DNA, 370 bp, Homo sapiens
caggttcagctggtgcagtctggagctgaggtgaagaagcctggggcctcagtgaaggtctcctgcaaggcttctggttacacctttaccacctatggtatcagctgggtgcgacaggcccctggacaagggcttgagtggatgggatggatcagcgcttacaatggtaacacaaactatgcacagaagctccagggcagagtcaccatgaccacagacacatccacgagcacagcctacatggagctgaggagcctgagatctgacgacacggccgtctattactgtgcgagaggggccccggggccaatccgcagctatggttactttgactactggggccagggaaccctggtcaccgtctcctcag

SEQ ID NO: 8744 - DNA, 387 bp, Homo sapiens
caggtccagctggtgcagtctggggctgaggtgaagaagcctgggtcctcggtgaaggtctcctgcaaggcttctggaggcaccttcagcagctatgctatcagctgggtgcgacaggcccctggacaagggcttgagtggatgggaaggatcatccctatccttggtatagcaaactacgcacagaagttccagggcagagtcacgattaccgcggacaaatccacgagcacagcctacatggagctgagcagcctgagatctgaggacacggccgtgtattactgtgcgagaagcaaatcgggttgtagtagtaccagctgctatggctactactactacggtatggacgtctggggccaagggaccacggtcaccgtctcctca

SEQ ID NO: 8745 - DNA, 370 bp, Homo sapiens
caggtgcaactggtggagtctgggggaggcttggtcaagcctggcgggtccctgagactctcctgtgcagcctctggattcacgttcagtgactcttacatgagctggatccgccaagctccagggaagggactggagtggctttcatacattagtggtggtggagttaccatatactatgcagactctgtgaagggccgattcaccgtctctagggataatgccaagagctcactgtatctgcaaatgagcagcctgagcgccgaggacacggccgtttattactgtgcgagagatagatattttggcacctggtggggaacctggttcgacccctggggccagggaatcctggtcaccgtctcctcag

SEQ ID NO: 8746 - DNA, 384 bp, Homo sapiens
caggtgcagctgcaggagtcgggcccaggactggtgaagccttcggagaccctgtccctcacctgcactgtctctggtggctccatcagtagttactactggagctggatccggcagcccccagggaagggactggagtggattgggtatatctattacagtgggagcaccaactacaacccctccctcaagagtcgagtcaccatatcagtagacacgtccaagaaccagttctccctgaagctgagctctgtgaccgccgcagacacggccgtgtattactgtgcgagacggggacccattactatggttcggggagttactacttactactactacggtatggacgtctggggccaagggaccacggtcaccgtctcctca

SEQ ID NO: 8747 - DNA, 388 bp, Homo sapiens
caggtgcagctggtgcagtctggggctgaggtgaagaagcctggggcctcagtgaaggtctcctgcaaggcttctggatacaccttcaccggctactatatgcactgggtgcgacaggcccctggacaagggcttgagtggatgggatggatcaaccctaacagtggtggcacaaactatgcacagaagtttcagggcagggtcaccatgaccagggacacgtccatcagcacagcctacatggagctgagcaggctgagatctgacgacacggccgtgtattactgtgcgagagatagggcccctgcttaccattgtagtagtaccagctgctataaggactggttcgacccctggggccagggaaccctggtcaccgtctcctcag

SEQ ID NO: 8748 - DNA, 388 bp, Homo sapiens
caggtgcagctggtgcagtctggggctgaggtgaagaagcctggggcctcagtgaaggtttcctgcaaggcatctggatacaccttcagcagctactacatgcactgggtgcgacaggcccctggacaagggcttgagtggatgggaatgatcaaccctagtggtggtagcacaacgtacgcacagaagttccagggcagagtcaccatgaccagggacacatccacgagcacagtctacatggagatgagcagcctgagatctgaggacacggccgtgtattactgcgctagagtaggaacctcaagcccggcatatgattacgtttgggggagttatagtggttttgatatctggggccaagggacaatggtcaccgtctcttcag

SEQ ID NO: 8749 - DNA, 384 bp, Homo sapiens
gaagtgcaactggtggagtctgggggaggcttggtccagccgggggggtccctgagactctcctgtgcagcctctggattcacctttagtagttattggatgagctgggtccgccaggctccagggaaggggctggagtgggtggccaacataaagcaagatggacgtgagaaaaactatgtggactctgtgaagggccgattcaccatctccagagacaacgccatgaactcactgtatctgcaaatgaacagcctgagagccgaggacacggctgtgtattactgcacgagagattcctaccgatattacgatttttggagtggttccccctcctactacatagacgtctggggcaaagggaccacggtcaccgtctcctca

SEQ ID NO: 8750 - DNA, 384 bp, Homo sapiens
caggtgcagctacagcagtggggcgcaggactgttgaagccttcggagaccctgtccctcacctgcgctgtctatggtgggtccttcagtggttactactggagctggatccgccagcccccagggaaggggctggagtggattggggaaatcaatcatagtggaagcaccaactacaacccgtccctcaagagtcgagtcaccatatcagtagacacgtccaagaaccagttctccctgaagctgagctctgtgaccgccgcggacacggctgtgtattactgtgcgagagcgattccctattactatggttcggggagttatccctactactactacggtatggacgtctggggccaagggaccacggtcaccgtctcctca

SEQ ID NO: 8751 - DNA, 384 bp, Homo sapiens
gaggtgcagctggtggagtctgggggaggcttggtacagcctggggggtccctgagactctcctgtgcagcctctggattcaccttcagtagctatagcatgaactgggtccgccaggctccagggaaggggctggagtgggtttcatacattagtagtagtagtagtaccatatactacgcagactctgtgaagggccgattcaccatctccagagacaatgccaagaactcactgtatctgcaaatgaacagcctgagagccgaggacacggctgtgtattactgtgcgagagagggggatctgggggggcagctgctgtcttactactactactactacatggacgtctggggcaaagggaccacggtcaccgtctcctca

SEQ ID NO: 8752 - DNA, 370 bp, Homo sapiens
caggtgcagctggtgcagtctggggctgaggtgaagaagcctggggcctcagtgaaggtctcctgcaaggcttctggatacaccttcaccgcctactatatccactgggtgcgacaggcccctggacaagggcttgagtggatgggatggatcaaccctaacagtggtggcacaaactctgcacagaactttcagggcagggtcaccatgaccagggacacgtccatcagcacagtctacatggaactgagcagcctgagatctgacgacacggccgtgtattactgtgcgagagatgtatattgtagtagttccagctgcggacactttgagtactggggccagggaaccctggtcaccgtctcctcag

SEQ ID NO: 8753 - DNA, 381 bp, Homo sapiens
caggtacagctacagcagtggggcgcaggactgttgaagccttcggagacgctgtccctcacctgcgctgtctatggtgggtccttcagtgattattactggagctggatccgccagcccccagggaaggggctggagtggattggggaaatccatcatagcggaagcaccaactacaacccgtctctcaagagtcgagtcactatatcaggagacacgtccaagaaccaattctccctgaagctgacctctgtgaccgccgcggacacggctgtgtatttctgtgcgagaggccagggtctctgtagtactaccacttgctattaccactactattatatggacgtctggggcaaagggaccacggtcaccgtctcctca

SEQ ID NO: 8754 - DNA, 384 bp, Homo sapiens
gaggtgcagctggtggagtctgggggaggcctggtcaagcctggggggtccctgagactctcctgtgcagcctctggattcaccttcagtagctatagcatgaactgggtccgccaggctccagggaaggggctggagggggtctcatccattagtagtagtagtagttacatatactacgcagactcagtgaagggccgattcaccatctccagagacagcgccaagaactcactgtatctgcaactgaacagcctgagagccgaggacacggctgtgtattactgtgcgagaggtgcacattatgactacgtttgggggagtaccttctactactactacatggacgtctggggcaaagggaccacggtcaccgtctcctca

SEQ ID NO: 8755 - DNA, 384 bp, Homo sapiens
gaggtgcagctggtggagtctgggggaggcctggtcaagcctggggggtccctgagactctcctgtgcagcctctggattcaccttcagtagctatagcatgaactgggtccgccaggctccagggaaggggctggagtgggtctcatccattagtagtagtagtagttacatatactacgcagactcagtgaagggccgattcaccatctccagagacaacgccaagaactcactgtatctgcaaatgaacagcctgagagccgaggacacggctgtgtattactgtgcgagacgggcatattgtggtggtgattgctattggagcacctactactactacatggacgtctggggcaaagggaccacggtcaccgtctcctca

SEQ ID NO: 8756 - DNA, 384 bp, Homo sapiens
caggtgcagctggtgcagtctggggctgaggtgaagtggcctgggtcctcggttaaggtctcctgcaagtcttctggaggcaccttcaccaactatgctatgacctgggtgcggcaggcccctggacaagggcttgagtggatgggaggaatcatccctacctctgctacaagaaactacgcacagaagttccggggcagagtcaccattactgcggacgaatccacgaccacagcctatatggagctgagcagcctgagatctgatgacacggccgtgtattactgtgcgagagttttcgtttggttcggggagttatcaaaaacccactactactactacatggacgtctggggcaaagggaccacggtcaccgtctcctca

SEQ ID NO: 8757 - DNA, 384 bp, Homo sapiens
caggtgcagctggtggagtctgggggaggcgtggtccagcctgggaggtccctgagactctcctgtgcagcctctggattcaccttcagtagctatggcatgcactgggtccgccaggctccaggcaaggggctggagtgggtggcagttatatcatatgatggaagtaataaatactatgcagactccgtgaagggccgattcaccatctccagagacaattccaagaacacgctgtatctgcaaatgaacagcctgagagctgaggacacggctgtgtattactgtgcgaaaggtgggcgttgggtagtaccagctgctatactagactactactactacatggacgtctggggcaaagggaccacggtcaccgtctcctca

SEQ ID NO: 8758 - DNA, 384 bp, Homo sapiens
caggtgcagctggtggagtctgggggaggcttggtcaagcctggagggtccctgagactctcctgtgcagcctctggattcaccttcagtgactactacatgagctggatccgccaggctccagggaaggggctggagtgggtttcatacattagtagtagtggtagtaccatatactacgcagactctgtgaagggccgattcaccatctccagggacaacgccaagaactcactgtatctgcaaatgaacagcctgagagccgaggacacggccgtgtattactgtgcgagacctcacgatagcagcagctggtccgcatattactactactactacggtatggacgtctggggccaagggaccacggtcaccgtctcctca

SEQ ID NO: 8759 - DNA, 382 bp, Homo sapiens
gaggtgcagctggtggagtctgggggaggcttggtacagcctggggggtccctgagactctcctgtgcagcctctggattcaccttcagtagctacgacatgcactgggtccgccaagctacaggaaaaggtctggagtgggtctcagctattggtactgctggtgacacatactatccaggctccgtgaagggccgattcaccatctccagagaaaatgccaagaactccttgtatcttcaaatgaacagcctgagagccggggacacggctgtgtattactgtgcaagggtcccaggcccaaaatactatgatagtagtggttattacgcccccctctcggactactggggccagggaaccctggtcaccgtctcctcag

SEQ ID NO: 8760 - DNA, 382 bp, Homo sapiens
caggtgcagctacagcagtggggcgcaggactgttgaagccttcggagaccctgtccctcacctgcgctgtctatggtgggtccttcagtggttactactggagctggatccgccagcccccagggaaggggctggagtggattggggaaatcaatcatagtggaagcaccaactacaacccgtccctcaagagtcgagtcaccatatcagtagacacgtccaagaaccagttctccctgaagctgagctctgtgaccgccgcggacacggctgtgtattactgtgcgagaggccgggggcccacgtattactatgatagtagtcatccaagggactggttcgacccctggggccagggaaccctggtcaccgtctcctcag

SEQ ID NO: 8761 - DNA, 367 bp, Homo sapiens
gaggtgcagctggtggagtctgggggaggcttggtaaagccagggcggtccctgagactctcctgtacagcttctggattcacctttggtgattatgctatgagctggttccgccaggctccagggaaggggctggagtgggtaggtttcattagaagcaaagcttatggtgggacaacagaatacgccgcgtctgtgaaaggcagattcaccatctcaagagatgattccaaaagcatcgcctatctgcaaatgaacagcctgaaaaccgaggacacagccgtgtattactgtactagagatgggtattactatggttcggggaccaactactggggccagggaaccctggtcaccgtctcctcag

SEQ ID NO: 8762 - DNA, 385 bp, Homo sapiens
caggtgcagctggtgcagtctggggctgaggtgaagaagcctggggcctcagtgaaggtttcctgcaaggcatctggatacaccttcaccagctaccatatgcactgggtgcgacaggcccctggacaagggcttgagtgcatgggaataatcaaccctagtggtggtagcacaacctacgcacagaagttccagggcagagtcaccatgaccagggacacgtccacgagcacagtctacatggagctgagcagcctgagatctgaggacacggccgtgtattactgtgcgagagatatgttggggacctattacgatattttgactggttacccccccccatttgactactggggccagggaaccctggtcaccgtctcctcag

SEQ ID NO: 8763 - DNA, 361 bp, Homo sapiens
caggtgcagctggtgcagtctggggctgaggtgaagaagcctggggcctcagtgaaggtctcctgcaagacttctggatacattttcaccgcctactacatacactgggtgcgacaggcccctggacaggggcttgagtggatgggatgtatcagccctatcagtggtggcacaaactatgcacagaagtttcagggcagggtcaccatgaccagggacacgtccatcaccacaggctacgtggagctgaacaggcttacatctgacgacacggccgtgtattactgtgcgagagactatagtaggaactggaactgcttcgacccctggggccagggaaccctggtcaccgtctcctcag

SEQ ID NO: 8764 - DNA, 385 bp, Homo sapiens
gaggtgcagctggtggagtctgggggaggcttggtccagcctggggggtccctgagactctcctgtgcagcctctggattcacctttagtagctattggatgagctgggtccgccaggctccagggaaggggctggagtgggtggccaacataaagcaagatggaagtgagaaatactatgtggactctgtgaagggccgattcaccatctccagagacaacgccaagaactcactgtatctgcaaatgaacagcctgagagccgaggacacggctgtgtattactgtgcgagagatggaggtagttactatgatagtagtggttattactacgtctcctcttttgaggactggggccagggaaccctggtcaccgtctcctcag

SEQ ID NO: 8765 - DNA, 370 bp, Homo sapiens
caggtgcagctggtgcagtctggggctgaggtgaagaagcctggggcctcagtgaaggtttcctgcaaggcatctggatacaccttcaccagctactatatgcactgggtgcgacaggcccctggacaagggcttgagtggatgggaataatcaaccctagtggtggtagcacaagctacgcacagaagttccagggcagagtcaccatgaccagggacacgtccacgagcacagtctacatggagctgagcagcctgagatctgaggacacggccgtgtattactgtgcgagagttgcgcgtttgggggagttatcgtctaacgacggggactactggggccagggaaccctggtcaccgtctcctcag

SEQ ID NO: 8766 - DNA, 357 bp, Homo sapiens
caggtgcagctgcaggagtcgggcccaggactggtgaagccttcggagaccctgtccctcacctgcactgtctctggtggctccatcagtagttactactggagctggatccggcagcccccagggaagggactggagtggattgggtatatctattacagtgggagcaccaactacaacccctccctcaagagtcgagtcaccatatcagtagacacgtccaagaaccagttctccctgaagctgagctctgtgaccgctgcggacacggccgtgtattactgtgcgaggtggtacgcgtactactactactacatggacgtctggggcaaagggaccacggtcaccgtctcctca

SEQ ID NO: 8767 - DNA, 360 bp, Homo sapiens
caggtgcagctggtggagtctgggggaggcgtggtccagcctgggaggtccctgagactctcctgtgcagcgtctggattcaccttcagtagctatggcatgcactgggtccgccaggctccaggcaaggggctggagtgggtggcagttatatggtatgatggaagtaataaatactatgcagactccgtgaagggccgattcaccatctccagagacaattccaagaacacgctgtatctgcaaatgaacagcctgagagccgaggacacggctgtgtattactgtgcgagagagaggcactactactactactacatggacgtctggggcaaagggaccacggtcaccgtctcctca

SEQ ID NO: 8768 - DNA, 366 bp, Homo sapiens
gaggtgcagctggtggagtctgggggaggcttggtccagcctggagggtccctgagactctcctgtgcagcctctggattcaccttcagtgaccactacatggactgggtccgccaggctccaggaaaggggctggagtgggttggccgtactagaaacaaagctgacagttacaccacagaatacgccgcgtctgtgaaaggcagattcaccatctcaagagatgattcaaggaactcactgtatctgcaaatgaacagcctgaaaaccgaggacacggccgtgtattactgtgctagagccagacaaagaggagggtcttacatggacgtctggggcaaagggaccacggtcaccgtctcctca

SEQ ID NO: 8769 - DNA, 361 bp, Homo sapiens
gaagtgcagctggtggagtctgggggaggcttggtacagcctggcaggtccctgagactctcctgtgcagcctctggattcacctttgatgattatgccatgcactgggtccggcaagctccagggaagggcctggagtgggtctcaggtattagttggaatagtggtagcataggctatgcggactctgtgaagggccgattcaccatctccagagacaacgccaagaactccctgtatctgcaaatgaacagtctgagagctgaggacacggccttgtattactgtgcaaaaggcgggccagcagtggctggccctatttgggtctggggccagggaaccctggtcaccgtctcctcag

SEQ ID NO: 8770 - DNA, 361 bp, Homo sapiens
gaagtgcacttggtggagtctgggggagacttggtacagcctggcaggtccctgagactctcctgtgcagcctctggattcacctttaatgattatgccatgcactgggtccggcaagctccagggaagggcctggagtgggtctcaggtattagttggaatagtggtagcataggctatggggactctgtgaggggccgattcaccatctccagagacaacgcgaagaactccctctatctgcaaatgaacagtctgagagctgacgacacggccttgtattactgtgcaaaggggaagtggttatcatcccctagacttgactactggggccagggaaccctggtcaccgtctcctcag

SEQ ID NO: 8771 - DNA, 356 bp, Homo sapiens
ggtgcagctgcaggagtcgggcccaggactggcgaagccttcggagaccctgtccctcacctgcactgtctctggtggctccatcactagttactactggagctggatccggcagcccccagggaagggactggagtggattggccatgtctattacactgggaccaccaggtacaacccctccctcaagagtcgactcaccatatcggtagacacgtccaagaaccagttctccctgaagttgacctctgtgaccgccgcagacacggccgtgtattactgtgcgaggcagggtgcatacggctatggtcaatttgacgactggggccagggaaccctggtcaccgtctcctcag

SEQ ID NO: 8772 - DNA, 361 bp, Homo sapiens
gaggtgcagctggtggagtccgggggaggcttagttcagcctggggggtccctgagactctcctgtgcagcctctggattcaccttcagtacctactggatgcactgggtccgccaagctccagggaaggggctgatgtgggtctcacgtattaatagtgatggagatagtaccaactacgcggactccgtgaagggccgattcaccatctccagagacaacgccaagaacacgctgtatctgcaaatgaacactctgagagccgaggacacggctgtatattactgtgcaagggattctagcggctcgtccggagatttgaactactggggccagggaaccctggtcaccgtctcctcag

SEQ ID NO: 8773 - DNA, 364 bp, Homo sapiens
caggtgcagctgcaggagtcgggcccaggactggtgaagccttcacagaccctgtccctcacctgcactgtctctggtggctccatcagcagtggtggttactactggagctggatccgccagcacccagggaagggcctggagtggattgggtacatctattacagtgggagcacctactacaacccgtccctcaagagtcgagttaccatatcagtagacacgtctaagaaccggttctccctgaagctgagctctgtgactgccgcggacacggccgtgtattactgtgcgagaggtcgccaaacggtggttactcgtctggactactggggccagggaaccctggtcaccgtctcctcag

SEQ ID NO: 8774 - DNA, 364 bp, Homo sapiens
caggtgcagctgcaggagtcgggcccaggactggtgaagccttcacagaccctgtccctcacctgcactgtctctggtggctccatgagcattggtggttactactggagttggatccgccagcacccagggaagggcctggagtggattggatacatctattacactggtattacctactacaacccgtccctcaagagtcgaattaccatattagtagacacgtcgaagaaccagttctccctgaagctgaactctgtgactgccgcggacacggccgtgtattactgtgcgagaggtttgggaagtgggacctactactttgacaactggggccagggaaccctggtcaccgtctcctcag

SEQ ID NO: 8775 - DNA, 364 bp, Homo sapiens
caggtcaccttgaaggagtctggtcctgtgctggtgaaacccacagagaccctcactctgacctgcaccgtctctgggttctcactcagcaatactagaatgggtgtgagctggatccgtcagcccccagggaaggccctggagtggcttgcacacattttttcgagtgacgataaatcctacagcacatctctgaagagcaggctcaccatctccaaggacacctccaaaagccaggtggtccttagcatgaccaacatggaccctgtggacacagccacatattactgtgcacaccacgaaaaggggaggtggacacaggtacactactggggccagggaaccctggtcaccgtctcctcag

SEQ ID NO: 8776 - DNA, 370 bp, Homo sapiens
gaggtgcagctgttggagtctgggggaggcttggtacagcctggggggtccctgagactctcctgtgcagcctctggattcacctttaccaactatgccatgagctgggtccgccaggctccagggaaggggctggagtgggtctcgggtattagtggtagtggtggtagcacatactacgcagactccgtgaagggccggttcaccatctccagagacaattccaagaacacgctgtatctgcaaataaacggcctgaaagccgaggacacggccgtattttactgtgcgaaagggggaggtagcagcacctggtactctctctactttgactactggggccagggaaccctggtcaccgtctcctcag

SEQ ID NO: 8777 - DNA, 364 bp, Homo sapiens
cagctgcagctgcaggagtcgggcccaggactggtgaagccttcggagaccctgtccctcacctgcactgtctctggtggctccatcagcagaattatttactactggggctggatccgccagcccccagggaaggggctggagtggattgggaatatctattatactgggagcacctactacaacccgtccctcaagagtcgagtcaccatatccgtagacacgtccaagaaccaattctccctgaagctgagctctgtgaccgccgcagacacggctgtctattactgtgcgagacatttgggttacttcggtgactacgcggactactggggccagggaaccctggtcaccgtctcctcag

SEQ ID NO: 8778 - DNA, 361 bp, Homo sapiens
gaggtgcagctggtggagtctgggggaggcctggtcaagcctggggggtccctgagactctcctgtgcagcctctggattcaccttcagtagctatagcatgaactgggtccgccaggctccagggaaggggctggagtgggtctcatccattagtagtagtagtagttacatatactacgcagactcagtgaagggccgattcaccatctccagagacaacgccaagaactcactgtatctgcaaatgaacagcctgagagccgaggacacggctgtgtattactgtgcgagatccaccccatatttgagtgggagccatcactactggggccagggaaccctggtcaccgtctcctcag

SEQ ID NO: 8779 - DNA, 361 bp, Homo sapiens
caggtgcaactggtggagtctgggggaggcgtggtccagcctgggaggtccctgagactctcctgtgcagcctctggattcaccttcagtggctttggcatgcactgggtccgccaggctcccggcaaggggctggagtgggtggcagttatatcatatgatggaagtaataaatactatgcagagtccgtgaagggccgattcaccattaccagagacaattccaagaacacgctgtatctgcaaatgaacagcctgagagctgaggacacggctgtgtattactgtgcccacactggtggtggttattttggccctatgggcaactggggccagggaaccctggtcaccgtctcctcag

SEQ ID NO: 8780 - DNA, 361 bp, Homo sapiens
caggtgcagctggtggagtctgggggaggcgtggtccagcctgggaggtccctgagactctcctgtgcagcctctggattcaccttcagtagttatggcatgcactgggtccgccaggctcctggcaaggggctggagtgggtggcagttatatcatatgacggaattaataaatactatgcagactccgtgaagggccgattcaccatctccagagacaattccaagaacacgctgtatctgcaaatgaacagcctgagagctgaggacacggctgtgtattactgtggccacactggtggtggttattttggccctatgggctactggggccagggaaccctggtcaccgtctcctcag

SEQ ID NO: 8781 - DNA, 361 bp, Homo sapiens
caggtgcagctggtggagtctgggggaggcgtggtccagcctgggaggtccctgagactctcctgtccagcctctggattcaccttcagtggctatgccatgcactgggtccgccaggctccaggcaaggggctggagtgggtggcagttatttcatatgatggaagcaataaatactatgcagactccgtgaagggccggttcaccatctccagagacaattccaagaacactctgtatctgcaaatgaacagtctgagagctgaggacacggctgtatattactgtgcgaggacgaacggcgggaactactacgactacctacactggggccagggaaccctggtcaccgtctcctcag

SEQ ID NO: 8782 - DNA, 361 bp, Homo sapiens
caggtgcagctggtggagtctgggggaggcgtggtccagcctgggaggtccctgagactctcctgtgcagcctctggattcaccttcagcatctatgctatgcactgggtccgccaggctccaggcaaggggctggaatgggtgtcagttatatcatatgatggaagcaaaaaatactacgcagactccgtgaagggccgattcaccatctccagagacaattccaagaacacgctgtatctgcaaatgaacagcctgagagttgaggacacggctgtgtattactgtgcgagagaggcggtgggacctaccccgaactttgactactggggccagggaaccctggtcaccgtctcctcag

SEQ ID NO: 8783 - DNA, 361 bp, Homo sapiens
caggtgcagctggtggagtctgggggaggcgtggtccagcctgggaggtccctgagactctcctgtgcagcctctggattcatcttcaatatctatgccatgcactgggtccgccaggctccaggcaaggggctggagtgggtggcagttatatcatatgatggaagcaataaatattacgcagactccgtgaggggccgattcaccatctccagagacaattcgaagaacacgctgtatctgcaaatgaacagcctgagagctgaggacgcggctgtatattactgtgcgagagggggtgggagctacttccactggttcgacccctggggccagggaaccctggtcaccgtctcctcag

SEQ ID NO: 8784 - DNA, 361 bp, Homo sapiens
caggtgcagctggtggagtctgggggaggcgtggtccagcctgggaggtccctgagactctcctgtgcagcctctggagtcaccttcagtagctatggcatgcactgggtccgccaggctccaggcaaggggctggagtgggtggcagttatatcatatgacggaagtaataaatactatgcagactccgtgaagggccgattcaccatctccagagacaattccaagaacacgctgtatctgcaaatgaacagcctgagagctgaggacacggctgtgtattactgtgcgaaagaccaatccttagtatggagtgtttttgatatctggggccaagggacaatggtcaccgtctcttcag

SEQ ID NO: 8785 - DNA, 361 bp, Homo sapiens
caggtgcagttggtggagtctgggggaggcgtggtccagcctgggaggtccctgagactctcctgcgcagcctctggattcactttcagtgccaatggcatgcactgggtccgccaggctccaggcaaggggccggagtgggtggcagttgtttcatttgatggaagggagatacattatgcggcctccgtggagggccgcttcaccatctccagagacagttccaacaacacagtgtctctgcaaatggacagcctgagacctgaggacaccggtgtgtattactgtgcgaagcagggagggacctacgcctggtacttcgatgtctggggtcgtggcaccctggtcactgtctcctcag

SEQ ID NO: 8786 - DNA, 370 bp, Homo sapiens
caggtgcagctgcaggagtcgggcccaggactggtgaagcctccggagaccctgtccctcacctgcactgtgtctggtggctccatcagtagtaaatactggagctggatccggcagcccgccgggaagggactggagtggattggccgtatctatgctactggaaataccaactacaaccccgccctcaagagtcgagtcaccatgtcagtagacacgtccaagaatcagttctccctgaagctgaacgctgtgaccgccgcggacacggccgtgtactactgtgcgagaggtcatcacgatttttggagtggttatgtggacgcttttgatatctggggccaagggacattggtcaccgtctcttcag

SEQ ID NO: 8787 - DNA, 373 bp, Homo sapiens
caggtgcaactggtgcagtctggggctgaggtgaagaagcctggggcctcagtgaaggtctcctgcaaggcttctggatacaccttcaccgactactatatacactgggtgcgacaggcccctggacaagggcttgagtggatgggatggatcaaccctaacagtggtggcacaaactatggacagaagtttcagggcagggtcaccatgaccagggacacgtccatcaacacagcctacatggacctgatcagactgacatctgacgacacggccgtatattactgtgcgagagcttattactctcacagtagtggtttctccgatacttttcatatctggggccaagggacaatggtcaccgtctcttcag

SEQ ID NO: 8788 - DNA, 374 bp, Homo sapiens
cagctgcagctgcaggagtcgggcccaggactggtgaagccttcggagaccctgtccctcacctgcactgtctctggtggctccatcagcagttatagttactactggggctggatccgccagcccccagggaaggggctagagtggattgggagtttcttttatagtgggagctcctactacaacccgtccctcaagagtcgagtcaccatatccgtagacacgtccaagaaccagttctccctgaagctgagctctgtgaccgccgcagacacggctgtgtattactgtgcgagggactgtagtaataccgcctgctatgacaccgatgcttttgatatctggggccaagggacaatggtcaccgtctcttc

SEQ ID NO: 8789 - DNA, 373 bp, Homo sapiens
caggtgcagctggtggagtctgggggaggcgtggtccagcctgggaggtccctgagactctcctgtgcagcctctggattcatcttcagttactatggcatgcactgggtccgccaggctccaggcaaggggctggagtgggtggcagttatttcatatgatggaagtaataaatattatgcagagtccgtgaagggccgatacaccatctccagagacaattccaagaacacgctgtatctgcaaatgaacagcctgagagatgaggacacggctgtgtattactgtgcgaaagatagggttgttgtactaccagctgtcctcgatgcttttgatatctggggccaagggacaatggtcaccgtctcttcag

SEQ ID NO: 8790 - DNA, 370 bp, Homo sapiens
caggtgcagctggtgcagtctggggctgaggtgaagaagcctggggcctcagtgaaggtctcctgcaaggcttctggatacaccttcaccggctactatatgcactgggtgcgacaggcccctggacaagggcttgagtggatgggatggatcaaccctaacagtggtggcacagactttgcacagaagtttcagggcagggtcaccatgaccagggacacgtccatcagcacagcctacatggagctgagcaggctgagatctgacgacacggccgtgtattactgtgcgagagattcgccaataccagctcgtcccggctggtacttcgatctctggggccgtggcaccctggtcactgtctcctcag

SEQ ID NO: 8791 - DNA, 370 bp, Homo sapiens
caggtgcagctggtgcagtctggggctgaggtgaagaagcctggggcctcagtgaaggtctcctgcaaggcttctggatacaccttcaccggctactatatgcactgggtgcgacaggcccctggacaagggcttgagtggatgggatggatcaaccctaacagtggtggcacaaactatgcacagaagtttcagggcagggtcaccatgaccagggacacgtccatcagcacagcctacatggagctgagcaggctgagatctgacgacacggccgtgtattactgtgcgagagccccatatagcagcagctggtacgactggtacttcgatctctggggccgtggcaccctggtcactgtctcctcag

SEQ ID NO: 8792 - DNA, 373 bp, Homo sapiens
caggtgcagctggtgcagtctggggctgaggtgaagaagcctggggcctcagtgaaggtttcctgcaaggcatctggatacaccttcaccagctactatatgcactgggtgcgacaggcccctggacaagggcttgagtggatgggaataatcaaccctagtggtggtagcacaagctacgcacagaagttccagggcagagtcaccatgaccagggacacgtccacgagcacagtctacatggagctgagcagcctgagatctgaggacacggccgtgtattactgtgctagatcgggcccctactatagcagcagctggtacgttgcttttgatatctggggccaagggacaatggtcaccgtctcttcag

SEQ ID NO: 8793 - DNA, 373 bp, Homo sapiens
caggtgcagctggtgcagtctggggctgaggtgaagaagcctggggcctcagtgaaggtctcctgcaaggcttctggatacaccttcaccgcctactgtatacactgggtgcgacaggcctctggacaaggacttgagtggatgggatggatcaaccctaacactggtggcacaaactatgcacagaagtttcagggtagggtcaccatgaccggggactcgtccatcagcacagccttcatggagttgagcagcttgagatctgacgacacggccgtctattactgtgcgagagtcaaggagtatagcagtgcctggtaccccaactggctcgacccctggggccagggaaccctcgtcaccgtctcctcag

SEQ ID NO: 8794 - DNA, 373 bp, Homo sapiens
caggtccagctggtgcagtctggggctgaggtgaagaagcctgggtcctcggtgaaggtctcctgcaaggcttctggaggcaccttcagcagctatgctatcagctgggtgcgacaggcccctggacaagggcttgagtggatgggaaggatcatccctatccttggtatagcaaactacgcacagaagttccagggcagagtcacgattaccgcggacaaatccacgagcacagcctacatggagctgagcagcctgagatctgaggacacggccgtgtattactgtgcgagagaaagtgtaggctacggtgactacagtggtaactggttcgacccctggggccagggaaccctggtcaccgtctcctcag

SEQ ID NO: 8795 - DNA, 369 bp, Homo sapiens
gaggagcagctggtggagtctgggggaggtttggtacagcctggggggtccctgagactctcctgtgtagcctctggattcaccttcaatatatacgacatgcactgggtccgccaagttacaggaaaaggtctggagtgggtcgcgagtattggtactcttgctgacacattctatccagactccgtgaagggccggtttaccatctccagagaaaatgccaagaactccatatatcttcagatgaacagcctgcaggccggggacacggctgtctattactgtgcaagaggagggagacccataccagccgccacttgggactggttcgacccctggggccagggaaccctggtgaccgtctcctca

SEQ ID NO: 8796 - DNA, 373 bp, Homo sapiens
gaggtgcagctggtggagtctgggggaggtgtggtacggcctggggggtccctgagactctcctgtgcagcctctggattcacctttgatgattatggcatgagctgggtccgccaagctccagggaaggggctggagtgggtctctggtattaattggaatggtggtagcacaggttatgcagactctgtgaagggccgattcaccatctccagagacaacgccaagaactccctgtatctgcaaatgaacagtctgagagccgaggacacggccttgtatcactgtgcgagagatcgactggcgtatagcagcagctggtacggctggttcgacccctggggccagggaaccctggtcaccgtctcctcag

SEQ ID NO: 8797 - DNA, 372 bp, Homo sapiens
gaggtgcagctggtggagtccgggggaggcttagttcagcctggggggtccctgagactctcctgtgcagcctctggattcaccttcagtagctactggatgcactgggtccgccaagctccagggaaggggctggtgtgggtctcacgtattaatagtgatgggagtagcacaagctacgcggactccgtgaagggccgattcaccatctccagagacaacgccaagaacacgctgtatctgcaaatgaacagtctgagagccgaggacacggctgtgtattactgtgcaagaggttcggtggtgactgcaatttactactactacggtatggacgtctggggccaagggaccacggtcaccgtctcctca

SEQ ID NO: 8798 - DNA, 375 bp, Homo sapiens
caggtgcagctgcaggagtcgggcccaggactggtgaagccttcacagaccctgtccctcacctgcactgtctctggtggctccatcagcagtggtggttactactggagctggatccgccagcacccagggaagggcctggagtggattgggtacatctattacagtgggagcacctactacaacccgtccctcaagagtcgagttaccatatcagtagacacgtctaagaaccagttctccctgaagctgagctctgtgactgccgcggacacggccgtgtattactgtgcgagagaacgcggaactggaactacgttctactactacggtatggacgtctggggccaagggaccacggtcaccgtctcctca

SEQ ID NO: 8799 - DNA, 372 bp, Homo sapiens
caggtgcagctggtggagtctgggggaggcgtggtccagcctgggaggtccctgagactctcctgtgcagcgtctggattcatcttcagtagctatggcatgcactgggtccgccaggctccaggcaaggggctggagtgggtggcttttatatggtatgatggaagtaataaatactatgcagactctgtgaagggccgattcaccatctccagagacaattccaagaacacgctgtttgtgcaaatgaacagcctgagagccgaggacacggctgtgtattactgtgcgagagaattacggagctctcccccctattactactactacatggacgtctggggcaaagggaccacggtcaccgtctcctca

SEQ ID NO: 8800 - DNA, 372 bp, Homo sapiens
caggtgcagctggtggagtctgggggaggcttggtcaagcctggagggtccctgagactctcctgtgcagcctctggattcaccttcagtgactactacatgagctggatccgccaggctccagggaaggggctggagtgggtttcatacattagtagtagtggtagtaccatatactacgcagactctgtgaagggccgattcaccatctccagggacaacgccaagaactcactgtatctgcaaatgaacagcctgagagccgaggacacggccgtgtattactgtgcgagagagaggaacggggtatggttcggggagcctaacggtatggacgtctggggccaagggaccacggtcaccgtctcctca

SEQ ID NO: 8801 - DNA, 369 bp, Homo sapiens
caggtgcagctgcaggagtcgggcccaggactggtgaagccttcggagaccctgtccctcacctgcactgtctctggtggctccatcagtagttactactggagctggatccggcagcccccagggaagggactggagtggattgggtatatctattacagtgggagcaccaactacaacccctccctcaagagtcgagtcaccatatcagtagacacgtccaagaaccagttctccctgaagctgagctctgtgaccgctgcggacacggccgtgtattactgtgcgagagatagatcccagctggtaccgtactactactactacatggacgtctggggcaaagggaccacggtcaccgtctcctca

SEQ ID NO: 8802 - DNA, 372 bp, Homo sapiens
caggtgcagttggtggagtctgggggaggcgtggtccagcctgggaggtccctgagactctcctgtgcagcctctggattcaccttcagtacctatggcatgcactgggtccgccaggctccaggcaaggggctggagtgggtgtcagttatatcacatgatggaagtaacaaaaattatgcagactccgtgaagggccgattcaccatctccagagacaaatccaagaacaccctgtatctccaaatgaacagcctgagaactgaggacacggctgtctattactgtgcgaaaagttggacttcttattccggctactactattacggtatggacgtctggggccaagggaccacggtcaccgtctcctca

SEQ ID NO: 8803 - DNA, 384 bp, Homo sapiens
gaagtgcagctggtggagtctgggggaggcttggtacagcctggcaggtccctgagactctcctgtgcagcctctggattcgtctttgatgataatgccatgcactgggtccggcaagctccagggaagggcctggagtgggtctcaggaataagtgggaatagtgatagtataggttatgcggactctgtgaagggccgattcaccatctccagagacaacgccaagaactccctgtatctgcaaatgaacagtctaagagccgaggacacggccctgtattactgtgcaaaagaggccatggcccgacgattggggcggaattactactattactactacatggacgtctggggcaaagggaccacggtcaccgtctcctca

SEQ ID NO: 8804 - DNA, 372 bp, Homo sapiens
gaggtgcagctgttggagtctgggggaggcttggtacagcctggggggtccctgagactctcctgtgcagcctctggattcacctttagcagctatgccatgagctgggtccgccaggctccagggaaggggctggagtgggtctcagctattagtggtagtggtggtagcacatactacgcagactccgtgaagggccggttcaccatctccagagacaattccaagaacacgctgtatctgcaaatgaacagcctgagagccgaggacacggccgtatattactgtgcgaaaggagatacagctatggtgccctactactactactacatggacgtctggggcaaagggaccacggtcaccgtctcctca

SEQ ID NO: 8805 - DNA, 369 bp, Homo sapiens
caggtgcagctacagcagtggggcgctggactcttgaagccttcggagaccctgtccctcacttgcgctgtctatggtgggtccttcagtggttactactggacctggatccgccagcccccagggaaggggctggagtggattggggaaatcaatcatagtggaagcaccaactacaacccgtccctcaagagtcgagtcaccatgtcagcagacacgtccaagaatcagttctccctgaagttgagttctgtgaccgccgcggacacggctgtgtattactgtgcgagaggctggagtgctcattcttactacttctactactacatggacgtctggggcaaagggaccacggtcaccgtctcctca

SEQ ID NO: 8806 - DNA, 372 bp, Homo sapiens
caggtgcagctggtgcagtctggggctgaggtgaagaagcctggggcctcagtgaaggtctcctgcgaggcttctggatacaccttcaccagttatgagatcaactgggtgcgacaggccactggacaagggcttgagtggatgggatggatgaaccctaacagtggtaacacaggccacgcacagaagttccagggcagagtcaccatgaccagggacacctccataagtacagcctacatggagttgagcaacctgagatctgacgacacggccgtgtattactgtgcgagaatcgcattcaggtatagcagtcactacatctacggtctggacgtctggggccaagggaccacggtcaccgtctcctca

SEQ ID NO: 8807 - DNA, 373 bp, Homo sapiens
caggtgcagctggtgcagtctggggctgaggtgaagaagcctggggcctcagtgaaggtctcctgcaaggcttctggatacaccttcaccagttatgatatcaactgggtgcgacaggccactggacaagggcttgagtggatgggatggatgaaccctaacagtggtaacacaggctatgcacagaagttccagggcagagtcaccatgaccaggaacacctccataagcacagcctacatggagctgagcagcctgagatctgaggacacggccgtgtattactgtgcgagagcctattacgatattttgactggttattattccccgatggacgtctggggcaaagggaccacggtcaccgtctcctcag

SEQ ID NO: 8808 - DNA, 373 bp, Homo sapiens
caggtgcagctggtggagtctgggggaggcttggtcaagcctggagggtccctgagactctcctgtgcagcctctggattcaccttcagtgactactacatgagctggatccgccaggctccagggaaggggctggagtgggtttcatacattagtagtagtggtagtaccatatactacgcagactctgtgaagggccgattcaccatctccagggacaacgccaagaactcactgtatctgcaaatgaacagcctgagagccgaggacacggccgtgtattactgtgcgagccacccgttgtagtagtaccagctgctatgggggtactttgactactggggccagggaaccctggtcaccgtctcctcag

SEQ ID NO: 8809 - DNA, 376 bp, Homo sapiens
caggtcaccttgagggagtctggtcctgcgctggtgaaacccacacagaccctcacactgacctgcagcttctctgggttctcactcagcactagtggaatttgtgtgagctggatccgtcagcccccagggaaggccctggagtggcttgcagtcattgattgggatgatgataaatactacagcacatctctgaagaccaggctcaccatctccaaggacacctccaaaaaccaggtggtccttacaatgaccaacatggaccctgtggacacagccacttattactgtgcacggacacttcggcggattggcggtggtaactgcgactactatgactactggggccagggaagcctggtcaccgtctcctcag

SEQ ID NO: 8810 - DNA, 373 bp, Homo sapiens
gaagtgcagctggtggaatctgggggaggcttggtacagcctggcaggtccctgagactctcctgtgcagcctctggattcacgtttgctgattttgccatgcactgggtccgacaaattccagggaggggcctggagtgggtctcaggtattagttggaatagtgctaacaaagactatgcggactctgtgaggggccgattcaccatctccagagacaacgtcaagaactccttgtatctgcaaatgaacagtctgagacctgaggacacggccttgtattactgtgcaaaagataaatggggcggtgtagcagcagctggagggagaattgactactggggccagggaaccctggtcaccgtctcctcag

SEQ ID NO: 8811 - DNA, 373 bp, Homo sapiens
caggtgcagctggtgcagtctggggctgaggtgaagaagcctggggcctcagtgaaggtctcctgcaaggcttctggatacaccttcaccagttatgatatcaactgggtgcgacaggccactggacaagggcttgagtggatgggatggatgaaccctaacagtggtaacacaggctatgcacagaagttccagggcagagtcaccatgaccaggaacacctccataagcacagcctacatggagctgagcagcctgagatctgaggacacggccgtgtattactgtgcgaggaagtattacgatttttggagtggttattataactactttgactactggggccagggaaccctggtcaccgtctcctcag

SEQ ID NO: 8812 - DNA, 361 bp, Homo sapiens
caagtgcacctggtggagtctgggggaggcgtggtccagcctgggaggtccctgagactctcctgtgcagcgtctggattcaccttcagtagctatggcatgcactgggtccgccaggctccaggcaaggggctggagtgggtggcagttatatggtatgatggaagtaataaatactatacagactccgtgaagggccgattcaccatctccagagacaattccaagaatacgctgtatctgcaaatgaacagcctgagagccgaggacacggctgtgtattactgtgcgagggaaggaacagtacctatgggagggctggactactggggccagggaaccctggtcaccgtctcctcag

SEQ ID NO: 8813 - DNA, 373 bp, Homo sapiens
gaggtgcagctggtggagtctgggggaggcttggtccagcctggggggtccctgagactctcctgtgcagcctctggattcaccttcagttcctatgctatgcactgggtccgccaggctccagggaagggactggaatatgtttccgctattagtaataatgggggtaccacatattatgcaaactctgtgaagggcagattcaccatctccagagacaattccaagaacacgctgtatcttcaaatgggcagcctgagagctgaggacatggctgtgtattactgtgcgaggtcctattgtagtactaccagctgctatacgggacgatttgactactggggccagggaaccctggtcaccgtctcctcag

SEQ ID NO: 8814 - DNA, 373 bp, Homo sapiens
gaggtgcagctggtggagtctgggggaggcctggtcaagcctggggggtccctgagactctcctgtgaagcctctggattcgccttcaatacctatgccatgaactgggtccgccaggttccagggaaggggctggagtgggtctcagccattactagtagtagtagttataaatattatgcagcctcagtgaagggccgattcaccatctccagagacaacgccaagaactcactgtatctggaaatgaacagtctgagagccgaggacacggctatttattattgtgcaagatgggggggtatcttagtagttccaactgctacatcctttgaccactggggccagggaatcctggtcacagtctcctcag

SEQ ID NO: 8815 - DNA, 373 bp, Homo sapiens
gaggtgcagctggtggagtctgggggaggcctggtcaagcctggggggtccctgagactctcctgtgcagcctctggattcaccttcagtagctatagcatgaactgggtccgccaggctccagggaaggggctggagtgggtctcatccattagtagtagtagtagttacatatactacgcagactcagtgaagggccgattcaccatctccagagacaacgccaagaactcactgtatctgcaaatgaacagcctgagagccgaggacacggctgtgtattactgtgcgagagattcctggagacattactatgatagtagtggttcccttgactactggggccagggaaccctggtcaccgtctcctcag

SEQ ID NO: 8816 - DNA, 373 bp, Homo sapiens
gaggtgcagctggtggagtctgggggaggcctggtcaagcctggggggtccctgagactctcctgtgaagcctctggattcgccttcaatacctatagcatgaactgggtccgccaggctccagggaaggggctggagtgggtctcagccattactagtagtagtagttataaatactatgcagactcagtgaagggccgattcaccatctccagagacaacgccaagaactcactgtatctggaaatgaacagcctgagagccgaggacacggctatttattattgtgcaagatgggggggtatcttagtagttccagcttctacatcctttgaccactggggccagggaatcctggtcacagtctcctcag

SEQ ID NO: 8817 - DNA, 373 bp, Homo sapiens
gaggtgcagctgttggagtctgggggaggcttggtacagcctggggggtccctgagactctcctgtgcagccactggattcacctttagcagctatgccatgagctgggtccgccaggctccagggaaggggctggagtgggtctcagcgattagtggtagtggtggtagcacattctacgcagactccgtgaagggccggttcaccgtctccagagacaattccaagaacacgctgtatctccaaatgaacagcctgagagccgaggacacggccgtatattactgtgcgaaagatcgatggtgggagaatcgatccgggggctggtacttcgatctctggggccgtggcaccctggtcactgtctcctcag

SEQ ID NO: 8818 - DNA, 376 bp, Homo sapiens
caggtgcagctgcaggagtcgggcccaggactggtgaagccttcacagaccctgtccctcacctgcactgtctctggtggctccatcagcagtggtggttactactggagctggatccgccagcacccagggaagggcctggagtggattgggtacatctattacagtgggagcacctactacaacccgtccctcaagagtcgagttaccatatcagtagacacgtctaagaaccagttctccctgaagctgagctctgtgactgccgcggacacggccgtgtattactgtgctggatattgtagtggtggtagctgctactccaaccaagggcttgactactggggccagggaaccctggtcaccgtctcctcag

SEQ ID NO: 8819 - DNA, 373 bp, Homo sapiens
caggtgcagctggtggagtctgggggaggcgtggtccagcctgggaggtccctgagactctcctgtgcagcctctggattcaccttcagtagctatggcatgcactgggtccgccaggctccaggcaaggggctggagtgggtggcagttatatcatatgatggaagtaataaatactatgcagactccgtgaagggccgattcaccatctccagagacaattccaagaacacgctgtatctgcaaatgaacagcctgagagctgaggacacggctgtgtattactgtgcgaaagactattgtagtagtaccagctgctataccgggccgattgactactggggccagggaaccctggtcaccgtctcctcag

SEQ ID NO: 8820 - DNA, 373 bp, Homo sapiens
caggtgcagctggtggagtccgggggaggcgtggtccagcctgggaggtccctgagactctcctgtgtagcctctggattcaccttcagtagctatggcatgcactgggtccgccaggctccaggcaaggggctggagtgggtggcagttatatcatatgatggaagtaataaatactatgcagactccgtgaagggccgattcaccatctccagagacaattccaagaacacgctgtatctgcaaatgaacagcctgagagctgaggacacggctgtgtattactgtgcgaaagatcgaggatattgtagtggtggtagctgctactaccctgactactggggccagggaaccctggtcaccgtctcctcag

SEQ ID NO: 8821 - DNA, 373 bp, Homo sapiens
caggtgcagctggtggagtctgggggaggcgtggtccagcctgggaggtccctgagactctcctgtgcagcctctggattcaccttcagtacctatggcatgcactgggtccgccaggctccaggcaaggggctggagtgggtggcagttatatcatatgatggaaataataaatattatgtagactccgtgaagggccgattcaccatctccagagacaattccaagaacacgctgtatctgcaaatgaacagcctgagagttgaggacacggctgtatattactgtgcgatcctgaccggctggggctatacggtgcccccaggctactttgactactggggccagggaaccctggtcaccgtctcctcag

SEQ ID NO: 8822 - DNA, 349 bp, Homo sapiens
gaggtgcagctggtggagtccgggggaggcttagttcagcctggggggtccctgagactctcctgtgcagcctctggattcaccttcaatacctactggatgcactgggtccgccaagctccagggaaggggctggtgtgggtctcacgtattagtagcgatgggaatgatacaacctacgcggactccgtgaagggccgattcaccatctccagagacaacgccaagaacacgatgtatctgcaaatgagcagtctgagagccgaggacacggctgtgtattactgtgcaagaggtcactatggtgactacgactggggccagggaaccctggtcaccgtctcctcag

SEQ ID NO: 8823 - DNA, 349 bp, Homo sapiens
caggttcaactggtgcagtctggagctgaggtgaagaagcctggggcctcagtgaaggtctcctgcaaggcttctggttacacctttaccagctatggtatcacctgggtgcggcaggcccctggacaagggcttgagtggatgggatggatcagcacttacaatgataacacaaagtatgcacagaagttccagggcagagtcaccatgaccacagacacatctacgagcacagcctacatggagatgaggagcctgagatctgacgacacggccgtgtattactgtgcgagaggtggggatggctgcaacccctggggccagggaaccctggtcaccgtctcctcag

SEQ ID NO: 8824 - DNA, 370 bp, Homo sapiens
caggtccagctgcaagagtcgggcccaggactggtgaagccttcggagaccctgtccctcacctgcactgtctctggtggctccatcagtagttactactggagctggatccggcagtccccagggaagggactggagtggattgggtatatctattacaatgggatcaccaactacaattcctccctcaagagtcgagtcaccatatcactagacacgtccaagaaccagttctccctgaagctgagctctgtgaccgctgcggacacggccgtgtattactgtgcgagagctgccgcgtatagcagtgcctgggcctactggtacttcgatctctggggccgtggcaccctagtcactgtctcctcag

SEQ ID NO: 8825 - DNA, 346 bp, Homo sapiens
gaggtgcagctggtggagtctggaggaggcttgatccagcctggggggtccctgagactctcctgtgcagcctctgggttcaccgtcagtagcaactacatgagctgggtccgccaggctccagggaaggggctggagtgggtctcagttatttatagcggtggtagcacattctacgcagactccgtgaagggccgattcaccatctccagagacaattccaagaacacgctgtatcttcaaatgaacagcctgagagccgaggacacggccgtgtattactgtgcgagagagacgtatgcttttgatatctggggccaagggacaatggtcaccgtctcttcag

SEQ ID NO: 8826 - DNA, 343 bp, Homo sapiens
gaggtgtacctggtggagtctgggggaggcttggtccagcctggggggtccctgagactctcctgtgcagcctctggattcaccgtcagtagcaactacatgacctgggtccgccaggctccagggagggggctggagtgggtctcagttgtttatagtggtggcacatactacgcagactccgtgaagggcagattcaccatctccagagacatttctaagaacacgctgtatcttcaaatgaacagcctcagagccgaagacacggctgtgtattactgtgcgggtaaatccaattactacgactactggggccagggaaccctaatcaccgtctcctcag

SEQ ID NO: 8827 - DNA, 346 bp, Homo sapiens
gaggtgcagctggtggagtctgggggaggcttggtccagcctggggggtccctgagactctcctgtgcagcctctggattcaccgtcagtagcaactacatgagctgggtccgccaggctccagggaaggggctggagtgggtctcagttatttatagcggtggtagcacatactacgcagactccgtgaagggcagattcaccatctccagagacaattccaagaacacgctgtatcttcaaatgaacagcctgagagccgaggacacggctgtgtattactgtgcgagggggtactatgatagtttagtctggggccagggaaccctggtcaccgtctcctcag

SEQ ID NO: 8828 - DNA, 378 bp, Homo sapiens
caggtcaccctgagggagtctggtcctgcgctggtgaaacccacacagaccctcacactgacctgcaccttctctgggttctcactcaccaccagtggaatgtgtgtgagctggatccgtcagcccccagggaaggccccggagtggcttgcactcattgactgggatgatgataaatactacagcacatctctgcaggccaggctcaccatctccaaggacacctccaacaaccaagtggtcctaacaatgaccaacatggaccctgtggacacagccacctattactgtgcacgctcttgtactcccgatggttccggtgactacttctatcacatggacgtctggggcaaggggaccacggtcaccgtctcctca

SEQ ID NO: 8829 - DNA, 375 bp, Homo sapiens
caggtgcagttggtggagtctgggggaggcgtggtccagcctgggaggtccctgagactctcctgtgcagcctctggattcagcttcactaattatggcttccactgggtccgcctgactccaggcaaggggctggagtgggtggcatttatatcatatgatggaagtcagaagttctatgcagactccatgaagggccgattcaccatctccagagacaattccaagaagacactctatctgcaaatgagcagtctgaggctagacgacacggctgtgtatcactgtgcgaaagtgagaaggatttttggactggcttccgcctcctacgatatggacgtctggggccaagggaccacggtcaccgtctcctca

SEQ ID NO: 8830 - DNA, 375 bp, Homo sapiens
caggtgcagctggtgcagtctggggctgaggtgaagaaggctgggtcctcggtgaaggtctcctgcaaggcttctggaggcaccctcagcagctttgttatcagctgggtgcgacaggcccctggacaagggcttgagtggatgggagggatcatccctatctttggtaaagcaaactacgcacagaagttccagggcagagtcacgattaccgcggacgaatccacgagcacagcctacatggagctgagcagcctgagatctgaggacacggccgtgtattactgtgcgaggggggtagtaccagctgccaaaaagccgggctactactacatggacgtctggggcaaagggaccacggtcaccgtctcctca

SEQ ID NO: 8831 - DNA, 378 bp, Homo sapiens
caggtgcagctgcaggagtcgggcccaggactggtgaagccttcacagaccctgtccctcacctgcactgtctctggtggctccatcagcagtggtggttactactggagctggatccgccagcacccagggaagggcctggagtggattgggtacatctattacagtgggagcacctactacaacccgtccctcaagagtcgagttaccatatcagtagacacgtctaagaaccagttctccctgaagctgagctctgtgactgccgcggacacggccgtgtattactgtgcgagagatcacgggccagctgctaacgcctactactactactacatggacgtctggggcaaagggaccacggtcaccgtctcctca

SEQ ID NO: 8832 - DNA, 378 bp, Homo sapiens
caggtgcagctgcaggagtcgggcccaggactggtgaagccttcacagaccctgtccctcacctgcactgtctctggtggctccatcagcagtggtggttactactggagctggatccgccagcacccagggaagggcctggagtggattgggtacatctattacagtgggagcacctactacaacccgtccctcaagagtcgagttaccatatcagtagacacgtctaagaaccagttctccctgaagctgagctctgtgactgccgcggacacggccgtgtattactgtgcgagagatcccccgtatagcagcagcccccggtggagggggggtatggacgtctggggccaagggaccacggtcaccgtctcctca

SEQ ID NO: 8833 - DNA, 375 bp, Homo sapiens
caggtgcagctggtggagtctgggggaggcgtggtccagcctgggaggtccctgagactctcctgtgcagcgtctggattcaccttcagtagctatggcatgcactgggtccgccaggctccaggcaaggggctggagtgggtggcagttatttggtatgatggaagtaatgaatactattcagactccgtgaagggccgattcaccatctccagagacaattccaagaacataatatatctgcaaatgaacagcctgagagccgaggacaccgctgtgtattactgtgcgagagatccggacgtattacgatttttgggtaactccaataacatggacgtctggggcaaagggaccacggtcaccgtctcctca

SEQ ID NO: 8834 - DNA, 375 bp, Homo sapiens
gaagtgcagctggtggagtctgggggaggcttggtacagcctggcaggtccctgagactctcctgtgcagcctctggattcacctttgatgattatgccatgcactgggtccggcaagctccagggaagggcctggagtgggtctcaggtattagttggaatagtggtagcataggctatgcggactctgtgaagggccgattcaccatctccagagacaacgccaagaactccctgtatctgcaaatgaacagtctgagagctgaggacacggccttgtattactgtgcaaaagatatgggggggcttcctgctacgtcccttacggtctacatggtcgtctggggcaaagggaccacggtcaccgtctcctca

SEQ ID NO: 8835 - DNA, 375 bp, Homo sapiens
gaggtgcagctggtggagtctgggggaggcttggtccagcctggggggtccctgagactctcctgtgcagcctctggattcacctttagtagctattggatgagctgggtccgccaggctccagggaaggggctggagtgggtggccaacataaagcaagatggaagtgagaaatactatgtggactctgtgaagggccgattcaccatctccagagacaacgccaagaactcactgtatctgcaaatgaacagcctgagagccgaggacacggctgtgtattactgtgcgagaagggcagtaacccacttacccttctactactactacggtatggacgtctggggccaagggaccacggtcaccgtctcctca

SEQ ID NO: 8836 - DNA, 372 bp, Homo sapiens
caggtgcagctgcaggagtcgggcccaggactggtgaagccttcggagaccctgtccctcacctgcactgtgtctggtggctccatcagtagttaccactggagctggatccggcagcccccagggaagggactggaatggattgggtatatctattacattgggagcaccaactacaacccctccctcaagagtcgagtcaccatatcagtagacacgtccaagaaccagttctccctgaagctgagctctgtgaccgctgcggacacggccgtgtattactgtgcgagagaggcgtataactttgatagtagtgcttacaactacggtatggacgtctggggccaagggaccacggtcaccgtctcctca

SEQ ID NO: 8837 - DNA, 372 bp, Homo sapiens
caggtgcagctgcaggagtcgggcccaggactggtgaagccttcggagaccctgtccctcacctgcactgtctctggtggctccatcagtagttactactggagctggatccggcagcccccagggaagggactggagtggattgggtatatctattacagtgggagcaccaactacaacccctccctcaagagtcgagtcaccatatcagtagacacgtccaagaaccagttctccctgaagctgagctctgtgaccgctgcggacacggccgtgtattactgtgcgagagtgtcgggtgggagttcgcctggctactactactactacatggacgtctggggcaaagggaccacggtcaccgtctcctca

SEQ ID NO: 8838 - DNA, 180 bp, Homo sapiens
aaaggcagaatcacaatctcaagagataattccgaaggcatcacctatctgcaaatgaagagcctgaaaaccgaggacacggccgtgtatttttgttccagattttggagttccacccattactattacttctacgatttggacgtctggggccaagggaccacggtcaccgtctcctca

SEQ ID NO: 8839 - DNA, 376 bp, Homo sapiens
gaggtgcagctggtgcagtctggagcagaggtgaaaaagccgggggagtctctgaagatctcctgtaagggttctggatacagctttaccagctactggatcggctgggtgcgccagatgcccgggaaaggcctggagtggatggggatcatctatcctggtgactctgataccagatacagcccgtccttccaaggccaggtcaccatctcagccgacaagtccatcagcaccgcctacctgcagtggagcagcctgaaggcctcggacaccgccatgtattactgtgcgagacaaacgcaaggttgggagctcggggacaccaataactggttcgacccctggggccagggaaccctggtcaccgtctcctcag

SEQ ID NO: 8840 - DNA, 379 bp, Homo sapiens
cagatcaccttgaaggagtctggtcttacgctggtgaaacccacacagaccctcacgctgacctgcaccttctctgggttctcactcagcactagtggagtgggtgtggcctggatccgtcagcccccaggaaaggccctggagtggcttggagtcatttattggaatgatgaaaagcgctacagcccatctctgaagagcaggctcaccatcaccaaggacacctccaaaaaccaggtggtccttacaatgaccaacatggaccctttggacacagccacatattactgtgcacgtccgctgtattactatgaaagtagtgatgcttacaactggttcgacccctggggccagggaacccgggtcaccgtctcctcag

SEQ ID NO: 8841 - DNA, 379 bp, Homo sapiens
caggtgcagctgcaggagtcgggcccaggactggtgaagccttcacagaccctgtccctcacctgcactgtctctggtggctccatcagcagtggtgattactactggagttggatccgccagcccccagggaagggcctggagtggattgggtacatctattacagtgggagcacctactacaacccgtccctcaagagtcgagttaccatatcagtagacacgtccaagaaccagttctccctgaagctgagctctgtgactgccgcagacacggccgtgtattactgtgccagagggacggattgtagtagtaccagctgcctgggtccctggttcgacccctggggccagggaaccctggtcaccgtctcctcag

SEQ ID NO: 8842 - DNA, 373 bp, Homo sapiens
caggtgcagctgcaggagtcgggcccaggactggtgaagccttcggagaccctgtccctcacctgcactgtctctggtggctccatcagtagttactactggagctggatccggcagcccccagggaagggactggagtggattgggtatatctattacagtgggagcaccaactacaacccctccctcaagagtcgagtcaccatatcagtagacacgtccaagaaccagttctccctgaagctgagctctgtgaccgctgcggacacggccgtgtattactgtgcgagagattcgggcgccgtgtataactggaactactttggctggttcgacccctggggccagggaaccctggtcaccgtctcctcag

SEQ ID NO: 8843 - DNA, 373 bp, Homo sapiens
caggtgcagctgcaggagtcgggcccaggactggtgaagccttcggagaccctgtccctcacctgcactgtctctggtggctccatcagtagttactactggagctggatccggcagcccccagggaagggactggagtggattgggtatatctattacagtgggagcaccaactacaacccctccctcaagagtcgagtcaccatatcagtagacacgtccaagaaccagttctccctgaagctgagctctgtgaccgctgcggacacggccgtgtattactgtgcgagaggggtatgtagtggtggtagctgctactccggggagcagttcgacccctggggccagggaaccctggtcaccgtctcctcag

SEQ ID NO: 8844 - DNA, 373 bp, Homo sapiens
caggtgcagctgcaggagtcgggcccaggactggtgaagccttcggagaccctgtccctcacctgcactgtctctggtggctccatcagtagttactactggagctggatccggcagcccccagggaagggactggagtggattgggtatatctattacagtgggagcaccaactacaacccctccctcaagagtcgagtcaccatatcagtagacacgtccaagaaccagttctccctgaagctgagctctgtgaccgctgcggacacggccgtgtattactgtgcgagagtcttttcagaagacctagtagtcgcccatatcggctggttcgacccctggggccagggaaccctggtcaccgtctcctcag

SEQ ID NO: 8845 - DNA, 379 bp, Homo sapiens
cagctgcagctgcaggagtcgggcccaggactggtgaagccttcggagaccctgtccctcacctgcactgtctctggtggctccatcagcagtagtagttactactggggctggatccgccagcccccagggaaggggctggagtggattgggagtatctattatagtgggagcacctactacaacccgtccctcaagagtcgagtcaccatatccgtagacacgtccaagaaccagttctccctgaagctgagctctgtgaccgccgcagacacggctgtgtattactgtgcgagaggccagcgatttttggagtggttattattgtacaactggttcgacccctggggccagggaaccctggtcaccgtctcctcag

SEQ ID NO: 8846 - DNA, 376 bp, Homo sapiens
gaggtgcaactggtggagtctgggggaggcttggtacagcctggggggtccctgagactctcctgtgcagcctctggattcaccttcaatagctatagcatgagctgggtccggcaggctccagggaaggggctggagtgggtttcattcattagcggtagtagtggtaccatatactacgcagactctgtggagggccgattcaccatctccagagacaatgccaagaactcactgtatctgcaaatgaacaccctgagagccgaggacacggctgtgtatttctgtgcgagcactcccccgtggatacagctatggttagaggggccccactttgactactggggccagggaaccctggtcaccgtctcctcag

SEQ ID NO: 8847 - DNA, 373 bp, Homo sapiens
caggtgcagctgcaggagtcgggcccaggactggtgaagccttcggagaccctgtccctcacctgcactgtctctggtggctccatcagtagttactactggagctggatccggcagcccccagggaagggactggagtggattgggtatatctattacagtgggagcaccaactacaacccctccctcaagagtcgagtcaccatatcagtagacacgtccaagaaccagttctccctgaagctgagctctgtgaccgctgcggacacggccgtgtattactgtgcgagagttcgatcacgtagagatggctacaattacgagggggactttgactactggggccagggaaccctggtcaccgtctcctcag

SEQ ID NO: 8848 - DNA, 376 bp, Homo sapiens
caggttcagctggtgcagtctggagctgaggtgaagaagcctggggcctcagtgaaggtctcctgcaaggcttctggttacacttttaccaggtatggtttcagctgagtgcgacaggcccctggacaagggcttgagtggatgggatggatcagcgcttacaatggtaacacaaactatgcacagaagctccagggcagagtcaccatgaccacagacacatccacgagcacagcctacatggagctgagcagcctgagatctgacgacacggccgtgtattactgtgcgaacgtgcagcagtggctggtaagaagggaaaccggagcctgatttgactactggggccagggaaccctggtcaccgtctcctcag

SEQ ID NO: 8849 - DNA, 379 bp, Homo sapiens
caggtgcagctgcaggagtcgggcccaggactggtgaagccttcacagaccctgtccctcacctgcactgtctctggtggctccatcagcagtggtggttactactggagctggatccgccagcacccagggaagggcctggagtggattgggtacatctattacagtgggagcacctactacaacccgtccctcaagagtcgagttaccatatcagtagacacgtctaagaaccagttctccctgaagctgagctctgtgactgccgcggacacggccgtgtattactgtgcgagggccaggggttactatgatagtagtggttattcgtactactttgactactggggccagggaaccctggtcaccgtctcctcag

SEQ ID NO: 8850 - DNA, 376 bp, Homo sapiens
caggtgcagctggtggagtctgggggaggcttggtcaagcctggagggtccctgagactctcctgtgcagcctctggattcaccttcagtgactactacatgagctggatccgccaggctccagggaaggggctggagtgggtttcatacattagtagtagtggtagtaccatatactacgcagactctgtgaagggccgattcaccatctccagggacaacgccaagaactcactgtatctgcaaatgaacagcctgagagccgaggacacggccgtgtattactgtgcgagagggggatcgtgggatagtagtggttattacccgtactactttgactactggggccagggaaccctggtcaccgtctcctcag

SEQ ID NO: 8851 - DNA, 373 bp, Homo sapiens
caggtccagctggtgcagtctggggctgaggtgaagaagcctgggtcctcggtgaaggtctcctgcaaggcttctggaggcaccttcagcagctatgctatcagctgggtgcgacaggcccctggacaagggcttgagtggatgggaaggatcatccctatccttggtatagcaaactacgcacagaagttccagggcagagtcacgattaccgcggacaaatccacgagcacagcctacatggagctgagcagcctgagatctgaggacacggccgtgtattactgtgcgagaaaccagtattacgatttttggagtggtcaacaaccccttgactactggggccagggaaccctggtcaccgtctcctcag

SEQ ID NO: 8852 - DNA, 376 bp, Homo sapiens
gaggtgcagctggtggagtctgggggaggcttggtccagcctggggggtccctgagactctcctgtgcagcctctggattcacctttagtagctattggatgagctgggtccgccaggctccagggaaggggctggagtgggtggccaacataaagcaagatggaagtgagaaatactatgtggactctgtgaagggccgattcaccatctccagagacaacgccaagaactcactgtatctgcaaatgaacagcctgagagccgaggacacggctgtgtattactgtgcgaccatggccatcggtagtggttattactacgtcccccactactttgactactggggccagggaaccctggtcaccgtctcctcag

SEQ ID NO: 8853 - DNA, 376 bp, Homo sapiens
gaggtgcagctggtggagtctgggggaggcttggtccagcctggggggtccctgagactctcctgtgcagcctctggattcacgtttagaagcaattgcatgagctgggtccgccaggctccagggaaggggctggagtgggtggccaacataaaacaagatggcagtgagaaatattatgtggactctgtggagggccgattcaccatctccagagacaacgtcaagaactcactgtatctgcaaatgaacagcctgagagccgaggacacggctgtgtattactgtgcgagaacgctaggtcacttctatgatagtagtggttgttactaccctggctactggggccagggaaccctggtcaccgtctcctcag

SEQ ID NO: 8854 - DNA, 379 bp, Homo sapiens
cagctgcagctgcaggagtcgggcccaggactggtgaagccctcggagaccctgtccctcacctgcactgtctctggtggctccatcagcagtagtagtgactactggggctggatccgccagcccccagggaaggggctggagtggattgggaatatctattatagtgggagcacctactacgacccgtccctcaagagtcgagtcaccatatccgtagacacgtccaagaaccagttctccctgaagctgagttctgtgaccgccgcagacacggctgtgtattattgtgcgagatatgtatatagtgggacctacatacgccccctcgatgcttttgatatctggggccaagggacaatggtcaccgtctcttcag

SEQ ID NO: 8855 - DNA, 376 bp, Homo sapiens
gaggtgcagctggtggagtctgggggaggcctggtcaagcctggggggtccctgagactctcctgtgcagcctctggattcaccttcagtagctatagcatgaactgggtccgccaggctccagggaaggggctggagtgggtctcatccattagtagtagtaggagttacatatactacgcagactcagtgaagggccgattcaccatctccagagacaacgccaagaactcactgtttctgcaaatgaacagcctgagagccgaggacacggctgtgtattactgtgcgagaaggttcgattactatgatagtagtggttatcctaatgcttttgatatctggggccaagggacaatggtcaccgtctcttcag

SEQ ID NO: 8856 - DNA, 382 bp, Homo sapiens
gaggtgcagctggtggagtctgggggaggcttggtaaagcctggggggtcccttagactctcctgtgcagcctctggattcactttcaattacgcctggatgacctgggtccgccaggctccagggaaggggctggagtgggttggccgtattaaaggcatacttgatggtgggacaacagactacgctgcacccgtgaaaggcagattcaccatctcaagagatgattcaaaaaacacgctgtatctgcaaatgaatagcctgaaaaccgaggacacagccgtgtattactgtaccacagacgtggatattgtagtggtggtagctgctgatgatgcttttgatatctggggccaagggacaatggtcaccgtctcttcag

SEQ ID NO: 8857 - DNA, 376 bp, Homo sapiens
caggttcagctggtgcagtctggagctgaggtgaagaagcctggggcctcagtgaaggtctcctgcaaggcttctggttacacctttaccagctatggtatcagctgggtgcgacaggcccctggacaagggcttgagtggatgggatggatcagcgcttacaatggtaacacaaactatgcacagaagctccagggcagagtcaccatgaccacagacacatccacgagcacagcctacatggagctgaggagcctgagatctgacgacacggccgtgtattactgtgcgagagaagaggtccagtgggagctaccgcggcgtgtgggtgcttttgatatctggggccaagggacaatggtcaccgtctcttcag

SEQ ID NO: 8858 - DNA, 373 bp, Homo sapiens
gaggtgcagctggtggagtctggaggaggcttgatccagcctggggggtccctgagactctcctgtgcagcctctgggttcaccgtcagtagcaactacatgagctgggtccgccaggctccagggaaggggctggagtgggtctcagttatttatagcggtggtagcacatactacgcagactccgtgaagggccgattcaccatctccagagacaattccaagaacacgctgtatcttcaaatgaacagcctgagagccgaggacacggccgtgtattactgtgcgagagataatgaacgctatgatagtagtggttattattcggcttttgatatctggggccaagggacaatggtcaccgtctcttcag

SEQ ID NO: 8859 - DNA, 402 bp, Homo sapiens
cagctgcagctgcaggagtcgggcccaggactggtgaagccttcggagaccctgtccctcacctgcactgtctctggtggctccatcagcagtagtagttactactggggctggatccgccagcccccagggaaggggctggagtggattgggagtatctattatagtgggagcacctactacaacccgtccctcaagagtcgagtcaccatatccgtagacacgtccaagaaccagttctccctgaagctgagctctgtgaccgccgcagacacggctgtgtattactgtgcgagacagggaaaaggatattgtagtagtaccagctgctcagggagggtttggtactactactacggtatggacgtctggggccaagggaccacggtcaccgtctcctca

SEQ ID NO: 8860 - DNA, 399 bp, Homo sapiens
gaggtgcagctgttggagtctgggggaggcttggtacagcctggggggtccctgagactctcctgtgcagcctctggattcacctttagcagctatgccatgagctgggtccgccaggctccagggaaggggctggagtgggtctcagctattagtggtagtggtggtagcacatactacgcagactccgtgaagggccggttcaccatctccagagacaattccaagaacacgctgtatctgcaaatgaacagcctgagagccgaggacacggccgtatattactgtgcgaaagaaatgggggggtattacgatttttggagtggttattatccctcgggatactactactacggtatggacgtctggggccaagggaccacggtcaccgtctcctca

SEQ ID NO: 8861 - DNA, 382 bp, Homo sapiens
gaagtgcagctggtggagtctgggggaggcttggtacagcctggcaggtccctgagactctcctgtgcagcctctggattcacctttgatgattatgccatgcactgggtccggcaagctccagggaagggcctggagtgggtctcaggtattagttggaatagtggtagcataggctatgcggactctgtgaagggccgattcaccatctccagagacaacgccaagaactccctgtatctgcaaatgaacagtctgagagctgaggacacggccttgtattactgtgcaaaagccccgaggccgtattactatgatagtagtggttaccccaggtggttcgacccctggggccagggaaccctggtcaccgtctcctcag

SEQ ID NO: 8862 - DNA, 397 bp, Homo sapiens
caggtgcagctacagcagtggggcgcaggactgttgaagccttcggagaccctgtccctcacctgcgctgtctatggtgggtccttcagtaattactactggagctggatccgccagcccccagggaaggggctggagtggattggggaaatcaatcatagtggaagcaccaattacaacccgtccctcaagagtcgagtcaccatatcagtagacacgtccaacaaccagttctccctgaagctgaactctgtgacagccgcggacacggctgtgtattactgtacgagaggcccgcgatttcgcccatccggacaatcacgattttcaggggggacgagggcgaaagatgcttttgatgtctggggccaagggacaatggtcaccgtctcttcag

SEQ ID NO: 8863 - DNA, 349 bp, Homo sapiens
gaggtgcagctggtgcagtctggagcagaggtgaaaaagcccggggagtctctgaagatctcctgtaagggttctggatacagctttaccagctactggatcggctgggtgcgccagatgcccgggaaaggcctggagtggatggggatcatctatcctggtgactctgataccagatacagcccgtccttccaaggccaggtcaccatctcagccgacaagtccatcagcaccgcctacctgcagtggagcagcctgaaggcctcggacaccgccatgtattactgtgcgagacgagaggtgacttttgactactggggccagggaaccctggtcaccgtctcctcag

SEQ ID NO: 8864 - DNA, 379 bp, Homo sapiens
caggtgcagctgcaggagtcgggcccaggactggtgaagccttcggagaccctgtccctcacctgcactgtctctggtggctccatcagtagttactactggagctggatccggcagcccccagggaagggactggagtggattgggtatatctattacagtgggagcaccaactacaacccctccctcaagagtcgagtcaccatatcagtagacacgtccaagaaccagttctccctgaagctgagctctgtgaccgccgcagacacggccgtgtattactgtgcgagacggcaagcggcttacgatattttgactggttattataaggactggttcgacccctggggccagggaaccctggtcaccgtctcctcag

SEQ ID NO: 8865 - DNA, 385 bp, Homo sapiens
caggtgcagctgcaggagtcgggcccaggactggtgaagccttcacagaccctgtccctcacctgcactgtctctggtggctccatcagcagtggtggttactactggagctggatccgccagcacccagggaagggcctggagtggattgggtacatctattacagtgggagcacctactacaacccgtccctcaagagtcgagttaccatatcagtagacacgtctaagaaccagttctccctgaagctgagctctgtgactgccgcggacacggccgtgtattactgtgcgagtctacgatattgtagtagtaccagctgccgaagggggggcaactggttcgacccctggggccagggaaccctggtcaccgtctcctcag

SEQ ID NO: 8866 - DNA, 382 bp, Homo sapiens
gaggtgcagttgttgcagtctgggggaggcttaatacagcctggggggtctctgagactctcctgtgcagcctctggattcaccttcagcagctatgccgtgggctgggtccgccaggctccaggcaaggggctggagtgggtctcaattattagtggtagtggtgatagttcatacttcgcagactccgtgaagggccggctcaccatctccagagacaattccaagaacatgttgtatctgcaaatgaacagcctgagggccgaggacacggccatatattactgtgcgaaacttgatggtttccatttttggagtggttattatcatggactagcctttgactactggggccagggaaccctggtcaccgtctcctcag

SEQ ID NO: 8867 - DNA, 385 bp, Homo sapiens
caggtgcagctgcaggagtcgggcccaggactggtgaagccttcacagaccctgtccctcacctgcactgtctctggtggctccatcagcagtggtggttactactggagttggatccgccagcacccagggaggggcctggagtggattgggtacatctattacagttggagcacctactacaacccgtccctcaagagtcgagttaccatatcagtagacacgtctaagaaccagttctccctgaagctgagctctgtgactgccgcggacacggccgtgtattactgtgcgagagctcggtcgatgattacgtttgggggaattatcgaggcccccaaatttgactactggggccagggaaccctggtcaccgtctcctcag

SEQ ID NO: 8868 - DNA, 382 bp, Homo sapiens
gaggtgcagctggtggagtccgggggaggcttagttcagcctggggggtccctgagactctcctgtgcagcctctggattcaccttcagtagctcctggatgcactgggtccgccaagctccagggaaggggctggtgtgcgtctcacgtattaatagtgatgggagtagcacatactacgcggactccgtgaggggccgattcaccatctccagagacaacgccaagaacacgctgtatctgcaaatggacagtctgagagccgaggacacggctgtgtattactgtgcaagagtctcgccttcctcctttactttgtttcggggaggaaacggggaatttgactactggggccagggaaccctggtcaccgtctcctcag

SEQ ID NO: 8869 - DNA, 382 bp, Homo sapiens
caggttcagctggtgcagtctggagctgaggtgaagaagcctggggcctcagtgaaggtctcctgcaaggcttctggttacacctttaccacctatggtatcagctgggtgcgacaggcccctggacaagggcttgagtggatgggatggatcagcgcttacaatggtaacacaaactatgcacagaagctccagggcagagtcaccatgaccaccgacacatccacgagcacagcctacatggagctgaggagcctgagatctgacgacacggccgtgtatcactgtgcgagagcgggaccgtgggcggatcacggggcacggggaggggggtcggactatgactactggggccagggaaccctggtcaccgtctcctcag

SEQ ID NO: 8870 - DNA, 385 bp, Homo sapiens
caggtgcagctgcaggagtcgggcccaggactggtgaagccttcggagaccctgtccctcacctgcactgtctctggtggctccgtcagcagtggtagttactactggagctggatccggcagcccccagggaagggactggagtggattgggtatatctattacagtgggagcaccaactacaacccctccctcaagagtcgagtcaccatatcagtagacacgtccaagaaccagttctccctgaagctgagctctgtgaccgctgcggacacggccgtgtattactgtgcgagagggtcttctgcttacgatttttggagtggttatccccactactactttgactactggggccagggaaccctggtcaccgtctcctcag

SEQ ID NO: 8871 - DNA, 381 bp, Homo sapiens
caggtgcagctggtgcagtctggggctgaggtgaagaagcctggggcctcagtgaaggtctcctgcaaggcttctggatacaccttcaccggctactatatgcactgggtgcgacaggcccctggacaagggcttgagtggatgggatggatcaaccctaacagtggtggcacaaactatgcacagaagtttcagggcagggtcaccatgaccagggacacgtccatcagcacagcctacatggagctgagcaggctgagatctgacgacacggccgtgtattactgtgcgagagcttgtagtggtggtagctgctacaattactactactactacggtatggacgtctggggccaagggaccacggtcaccgtctcctca

SEQ ID NO: 8872 - DNA, 385 bp, Homo sapiens
cagctgcagctgcaggagtcgggcccaggactggtgaagccttcggagaccctgtccctcacctgcactgtctctggtggctccatcagcagtagtagttactactggggctggatccgccagcccccagggaaggggctggagtggattgggagtatctattatagtgggagcacctactacaacccgtccctcaagagtcgagtcaccatatccgtagacacgtccaagaaccagttctccctgaagctgagctctgtgaccgccgcagacacggctgtgtattactgtgcgaggcaaaacgtattacgatattttgactggttatcaacccccggggactttgactactggggccagggaaccctggtcaccgtctcctcag

SEQ ID NO: 8873 - DNA, 385 bp, Homo sapiens
cagctgcagctgcaggagtcgggcccaggactggtgaagccttcggagaccctgtccctcacctgcactgtctctggtggctccatcagcagtagtagttactactggggctggatccgccagcccccagggaaggggctggagtggattgggagtatctattatagtgggagcacctactacaacccgtccctcaagagtcgagtcaccatatccgtagacacgtccaagaaccagttctccctgaagctgagctctgtgaccgccgcagacacggctgtgtattactgtgcgagaaataccggggggtattacgatattttgactggttattactcctactttgactactggggccagggaaccctggtcaccgtctcctcag

SEQ ID NO: 8874 - DNA, 381 bp, Homo sapiens
gaggtgcaactggtggggtctgggggaggcttggtccagcctggggggtccctgagactctcctgtgcagcctctggattcacctttagtaggtattggatgagctgggtccgccaggctccagggaaggggccggagtgggtggccaatataaagcaagatggaagtgagaaatactatatggactctgtgaagggccgattcaccgtctccagagacaacgccaagaactcagtgtatctgcaaatgaacagtctgagagccgaggacacggctgtctattactgtgcgagagaggaatattgtagtagtaccagctgcccctttaactactactacatggacgtctggggcaaagggaccacggtcaccgtctcctca

SEQ ID NO: 8875 - DNA, 381 bp, Homo sapiens
gaggtgcagctggtggagtctgggggaggcttggtccagcctggggggtccctgagactctcctgtgcagcctctggattcacctttagtagctattggatgagctgggtccgccaggctccagggaaggggctggagtgggtggccaacataaagcaagatggaagtgagaaatactatgtggactctgtgaagggccgattcaccatctccagagacaacgccaagaactcactgtatctgcaaatgaacagcctgagagccgaggacacggctgtgtattactgtgcgagggaagatattgtagtagtaccagctgctatattgtactactacggtatggacgtctggggccaagggaccacggtcaccgtctcctca

SEQ ID NO: 8876 - DNA, 381 bp, Homo sapiens
caggtgcagctggtggagtctgggggaggcgtggtccagcctgggaggtccctgagactctcctgtgcagcctctggattcagtttcagtagctatggcatgcactgggtccgccaggctccaggcaaggggctggagtgggtggcagttatgtcatatgatggaagtaataaatactatccagactccgtgaagggccgattcaccatctccagagacaattccaagaacacgctgtatctgcaaatgaacagcctgagagctgaggacacggctgtgtattactgtgcgaaagccgctacttcggggggtaaccccaaagtcgactactactactacatggacgtctggggcaaagggaccacggtcaccgtctcctca

SEQ ID NO: 8877 - DNA, 381 bp, Homo sapiens
gaggtgcagttggtggagtccgggggaggcttagttcagcctggggggtccctgagactctcctgtgcagcctctggattcaccttcagtaggtactggatacactgggtccgccaacctccagggaaggggctggtgtgggtctcacgtataaatagtgatggaaatagtacagactacgcggactccgtgaagggccgattcaccatctccagagacaacgccaagaacatgttgtatctgcgaatgaacagtctgggagccgaggacacggctatatattattgtgcaaggggatactatggttcggagacttacccctcctccttttattactacatggacgtctggggcaaagggaccacggtcaccgtctcctca

SEQ ID NO: 8878 - DNA, 375 bp, Homo sapiens
gaggtgcagctggtggagtctgggggaggcctggtcaagcctggggggtccctgagactctcctgtgcagcctctggattcaccttcagtagctatagcatgaactgggtccgccaggctccagggaaggggctggagtgggtctcatccattagtagtagtagtagttacatatactacgcagactcagtgaagggccgattcaccatctccagagacaacgccaagaactcactgtatctgcaaatgaacagcctgagagccgaggacacggctgtgtattactgtgcgagagatcagccgagctccaggggctactactactactacggtatggacgtctggggccaagggaccacggtcaccgtctcctca

SEQ ID NO: 8879 - DNA, 375 bp, Homo sapiens
gaggtgcagctggtggagtctgggggaggcctggtcaagcctggggggtccctgagactctcctgtgcagcctctggattcaccttcagtagttatagcatgaactgggtccgccaggctccagggaaggggctggagtgggtctcatccattagtagtggtggtagttacatatactacgcagactcagtgaagggccgattcaccatctccagagacaacgccaagaactcactgtatctgcaaatgaacagcctgagagccgaggacacggctgtgtattactgtgcgagagatctcccccgatttttggagtggttattatctagtggtgtggacgtctggggccaagggaccacggtcaccgtctcctca

SEQ ID NO: 8880 - DNA, 375 bp, Homo sapiens
gaggtgcagctggtggagtctgggggaggcctggtcaagcctggggggtccctgagactctcctgtgcagcctctggattcaccttcagtagctatagcatgaactgggtccgccaggctccagggaaggggctggagtgggtctcatccattagtagtagtagtagttacatatactacgcagactcagtgaagggccgattcaccatctccagagacaacgccaagaactcactgtatctgcaaatgaacagcctgagagccgaggacacggctgtgtattactgtgcgagagaatcggaattacgatttttggagtggctaccctactacatggacgtctggggcaaagggaccacggtcaccgtctcctca

SEQ ID NO: 8881 - DNA, 381 bp, Homo sapiens
gaggtgcagctggtggagtctgggggaggcctggtcaagcctggggggtccctgagactctcctgtgcagcctctggattcaccttcagtagctatagcatgaactgggtccgccaggctccagggaaggggctggagtgggtctcatccattagtagtagtagtagttacatatactacgcagactcagtgaagggccgattcaccatctccagagacaacgccaagaactcactgtatctgcaaatgaacagcctgagagccgaggacacggctgtgtattactgtgcgtcgatttttggagtggttatcccccgaactgaatactactactacggtatggacgtctggggccaagggaccacggtcaccgtctcctca

SEQ ID NO: 8882 - DNA, 381 bp, Homo sapiens
gaagtgcagctggtggagtctgggggaggcttggtacagcctggcaggtccctgagactctcctgtgcagcctctggattcaactttgatgattatgccatgcactgggtccggcaagctccagggaagggcctggagtgggtctcaggtagtagttggaatagtggtaccataggctatgcggactctgtgaagggccgattcaccatctccagagacaacgccaagaactccctgtatctgcaaatgaacagtctgagagctgaggacacggccttgtattactgtgcaaaattaccggatgacgatttttggagtgcttctcgctattattatggtatggacgtctggggccaagggaccacggtcaccgtctcctca

SEQ ID NO: 8883 - DNA, 379 bp, Homo sapiens
caggtgcagctgcaggagtcgggcccaggactggtgaagccttcggagaccctgtccctcacgtgcactgtctctggtggctccatcaataattactactggacctggatccggcagcccccagggaagggactggagtggattggcaatatctattacagtggggccacccactacaacccctccctcaagaatcgagtcgccatgtcaatagacacgtccaagaatcagttctccctgaacttgacttttctgaccgctgcggacacggccgtctattactgtgcgagacgggtgtttgacagtagtggttataattcgccgcgatactggtacttcgatctctggggccgtggcaccccggtcactttctcctcag

SEQ ID NO: 8884 - DNA, 379 bp, Homo sapiens
gaggtgcagctggtggagtctgggggaggcttggtccagcctggggggtcactgagactctcctgtgtagcctctggattcaccgtcagtagcaactacatgaactgggtccgccaggctccagggaaggggctggagtgggtctcagtcatttatagcgctggtagcacatactacgcagactccgtgaagggcagattcaccatctccagagacaattccaaaaacacgctgtatcttcaaatgaacagcctgagagccgaggacacggctgtgtattactgtgcgagtccgggggattattatgatagtagtggttattacccccactatgacctccagcactggggccagggcaccctggtcaccgtctcctcag

SEQ ID NO: 8885 - DNA, 379 bp, Homo sapiens
caggtgcagctgcaggagtcgggcccaggactggtgaagccttcggagaccctgtccctcacctgcactgtctctggtggctccatcagtagttactactggagctggatccggcagcccccagggaagggactggagtggattgggtatatctattacagtgggagcaccaactacaacccctccctcaagagtcgagtcaccatatcaatagacacgtccaagacccagttctccctgaagctgagctctgtgaccgccgcagacacggccgtgtattactgtgcgacctcttcctatgatattagtatttataaacacaggcttttggctgcttttgatatctggggccaagggacaatggtcaccgtctcttcag

SEQ ID NO: 8886 - DNA, 379 bp, Homo sapiens
caggtgcagctgcaggagtcgggcccaggactggtgaagccttcggagaccctgtccctcacctgcactgtctctggtggctccatcagtagttactactggagctggatccggcagcccccagggaagggactggagtggattgggtatatctattacagtgggagcaccaactacaacccctccctcaagagtcgagtcaccatatcagtagacacgtccaagaaccagttctccctgaagctgagctctgtgaccgctgcggacacggccgtgtattactgtgcgagagagggatattgtagtagtaccagctgctatgccgccgctgatgcttttgatatctggggccaagggacaatggtcaccgtctcttcag

SEQ ID NO: 8887 - DNA, 385 bp, Homo sapiens
caggtgcagctgcaggagtcgggcccaggactggtgaagccttcacagaccctgtccctcacctgcactgtctctggtggctccatcagcagtggtggttactactggagctggatccgccagcacccagggaagggcctggagtggattgggtacatctattacagtgggagcacctactacaacccgtccctcaagagtcgagttaccatatcagtagacacgtctaagaaccagttctccctgaagctgagctctgtgactgccgcggacacggccgtgtattactgtgcgaggtattccgactatggttcggggagttatcggatttataactggtacttcgatctctggggccgtggcaccctggtcactgtctcctcag

SEQ ID NO: 8888 - DNA, 385 bp, Homo sapiens
caggtgcagctgcaggagtcgggcccaggactggtgaagccttcacagaccctgtccctcacctgcactgtctctggtggctccatcagcagtggtggttactactggagctggatccgccagcacccagggaagggcctggagtggattgggtacatctattacagtgggagcacctactacaacccgtccctcaagagtcgagttaccatatcagtagacacgtctaagaaccagttctccctgaagctgagctctgtgactgccgcggacacggccgtgtattactgtgcgagagacgccggcgtaagttgtagtagtaccagctgcttcggttatgcttttgatatctggggccaagggacaatggtcaccgtctcttcag

SEQ ID NO: 8889 - DNA, 167 bp, Homo sapiens
attaacaatctcaagcaacacccttttaagtgcagtctgccttacaatgaccaatctgaaagccaaggacaaggtcatgtattactgccagatattgtagtagtaccagctgctacacaatgcttttgatatctggggccaagggacaatggtcaccgtctcttcag

SEQ ID NO: 8890 - DNA, 370 bp, Homo sapiens
caggtgcagctgcaggagtcgggcccaggactggtgaagccttcacagaccctgtccctcacctgcactgtctctggtggctccatcagcagtggtgattactactggagttggatccgccagcccccagggaagggcctggagtggattgggtacatctattacagtgggagcacctactacaacccgtccctcaagagtcgagttaccatatcagtagacacgtccaagaaccagttctccctgaagctgagctctgtgactgccgcagacacggccgtgtattactgtgccagagactacctaacctgggcgtcgggttatgcttttgatatctggggccaagggacaatggtcaccgtctcttcag

SEQ ID NO: 8891 - DNA, 373 bp, Homo sapiens
gaggtgcagctggtggagtctgggggaggcttggtccagcctggagggtccctgagactctcctgtgcagcctctggattcaccatcagtgaccactacatggactgggtccgccaggctccagggaaggggctggagtgggttggccgtactagaaacaaagcttacagttacaccacagaatacgccgcgtctgtgaaaggcagattcaccatctcaagagatgattcaaagaattcattgtatctgcaaatgaacagcctgaaaaccgaggacacggccgtatattactgtgctagatcacgggtggtagttgctactggggatgattttaatgtctggggccaagggacaatggtcaccgtctcttcag

SEQ ID NO: 8892 - DNA, 376 bp, Homo sapiens
gaggtgcagctgttggagtctgggggaggcttggtacagcctggggggtccctgagactctcctgtgcagcctctagattcacctttagcacctacgccatgacctgggtccgccaggctccagggaaggggctggagtgggtctcatctattagtggtaatggtgataaaacatactacgcagacaccgtgaagggccggttcaccatctccagagacaattccaagaacaccctgtatctgcaaatgaacagcctgagagccgaggacacggccctatattactgtgcgaaagataggcccccctcatatatagcggctcgtcggggagaatttgattactggggccagggaaccctggtcaccgtctcctcag

SEQ ID NO: 8893 - DNA, 367 bp, Homo sapiens
gaggtgcagctggtggagtccgggggaggcttagttcagcctggggggtccctgagactctcctgtgcagcctctggattcaccttcagtagctactggatgcactgggtccgccaagctccagggaaggggctggtgtgggtctcacgcattaatagtgatgggagtagcacaagctacgcggactccgtgaagggccgattcaccatctccagagacaacgccaagaacacgctgtatctgcaaatgaacagtctgagagccgaggacacggctgtgtattactgtgcaaggtgtagtgggacctactactgttacaactactttgactactggggccagggaaccctggtcaccgtctcctcag

SEQ ID NO: 8894 - DNA, 367 bp, Homo sapiens
caggtgcagctggtgcagtctggggctgaggtgaagaagcctgggtcctcggtgaaggtctcctgcaaggcttctggaggcaccttcagcacctatactatcacctgggtgcgacaggcccctggacaaggccttgagtggatgggagggatcatccctatctttcgtacagcaaactacgcacagaagttccagggcagagtaacgattatcgcggacgaatccacgagcacagcctacatggagctgagcagcctgagatctgaagacacggccgtctattattgtgcgagaggtcgttttgagtatagcagctggtccccttttgactactggggccagggaaccctggtcaccgtctcctcag

SEQ ID NO: 8895 - DNA, 367 bp, Homo sapiens
caggtgcagctggtggagtctgggggaggcgtggtccagcctgggaggtccctgagactctcctgtgcagcctctggattcaccttaagtagctatgctatgcactggttccgccaggctccaggcaaggggctggagtgggtggcagttatatcatatgatggaagcaataaatactacgcagactccgtgaagggccgattcaccatctccagagacaattccaagaacacgttgtatctgcaattgaacagcctgagagctgaggacacggctgtgtattactgtgcgagagttcagggaggtgggagttactacggggcctttgagtactggggccagggaaccctggtcaccgtctcctcag

SEQ ID NO: 8896 - DNA, 370 bp, Homo sapiens
cagatcaccttgaaggagtctggtcctacgctggtgaaacccacacagaccctcacgctgacctgcaccttctctgggttctcactcagcactagtggagtgggtgtgggctggatccgtcagcccccaggaaaggccctggagtggcttacactcatttattggaatgatgatcagcgctacagcccctctttgaagagcaggctcaccatcaccaaggacacctccaaaaaccaggtggtccttacaatgaccaacatggaccctgtggacacagccacatattactgtgcacacactccgaccaagttagagtggttattctactttgactactggggccagggaaccctggtcaccgtctcctcag

SEQ ID NO: 8897 - DNA, 364 bp, Homo sapiens
caggtgcagctgcaggagtcgggcccaggactggtgaagccttcggagaccctgtccctcacctgcactgtctctggtggctccatcagtagttactactggagctggatccggcagcccccagggaagggactggagtggattgggtatatctattacagtgggagcaccaactacaacccctccctcaagagtcgagtcaccatatcagtagacacgtccaagaaccagttctccctgaagctgagctctgtgaccgctgcggacacggccgtgtattactgtgcgagaggaggggcgatctacggtgaccacacgctttttgactactggggccagggaaccctggtcaccgtctcctcag

SEQ ID NO: 8898 - DNA, 364 bp, Homo sapiens
caggtgcagctgcaggagtcgggcccaggactggtgaagccttcggagaccctgtccctcacctgcactgtctctggtggctccatcagtagttactactggagctggatccggcagcccccagggaagggactggagtggattgggtatatctattacagtgggagcaccaactacaacccctccctcaagagtcgagtcaccatatcagtagacacgtccaagaaccagttctccctgaagctgagctctgtgaccgccgcagacacggccgtgtattactgtgcgagacatagccccagatggctacaaggcacctactttgactactggggccagggaaccctggtcaccgtctcctcag

SEQ ID NO: 8899 - DNA, 367 bp, Homo sapiens
gaagtgcagctggtggagtcggggggaaacttggtacagcctggggggtccctgagactctcctgtacagcctctggattcatcttcagtagttatggcttgaactgggtccgccaggctccagggaaggggctggaatggatttcatacattagtagtagtagtaatagcatatactacgcagattctgtgaagggccgattcaccatctccagagacaatgccaagaattcattgtatttgcaaatgaacagcctgagagacgaggacacggctgtttattactgtgcgagagatgtgacctacagtgctaattattatagcggccttgactggggccagggaaccctggtcaccgtctcctcag

SEQ ID NO: 8900 - DNA, 370 bp, Homo sapiens
caggtgcagctgcaggagtcgggcccaggactggtgaagcctttacagaccctgtccctcacctgcactgtctctggtggctccatcagaggtggtggttactactggagctggatccgccagcacccagggaagggcctggagtggattgggaatatctattatagtgggagtaccaactacaacccgtccctcaagagtcgacttagcatatcactggacacgtctaagaaccagttctccctgaaactgagctctgtgactgccgcggacacggccgtgtattattgtgcgagaagttggacttattatgaaagtagtggtgacccaggctactggggccagggaaccctggtcaccgtctcctcag

SEQ ID NO: 8901 - DNA, 370 bp, Homo sapiens
caggtgcagctgcaggagtcgggcccaggactggtgaagccttcacagaccctgtccctcacctgcattgtctctggtgactccatcgacagtggtggttattactggagctggctccgccagcacccaggggagggcctggagtggattgggcacacctcttacagtgggagaacctactacaacccgtccctcaagagtcaagttactatatcagtagacacgtctaagaaccagttctccctgaaagtgagctctgtgactgccgcggactcggccatatattactgtgcgagggtaggacttaggactttgggcaaattctattttgactactggggccagggagccctggtcaccgtctcctcag

SEQ ID NO: 8902 - DNA, 367 bp, Homo sapiens
gaggtgcagctgttggagtctgggggaggcttggtacagcctggggggtccctgagactctcctgtgcagcctctggattcacgtttcgcaactatgccctgagctgggtccgccaggctccagggagggggctggagtgggtctcaggtatcagtgctggtgaagctatcacatactacgcggactccgtgaagggccggttcaccatctccagagacaattccaagaacgcactgtatcttcaaatgaacagcctgagagccgaggacacggccgtttattactgtgcgaaagtggccgatatagcggcaattgggaccggctttgactactggggccagggaaccctggtcaccgtctcctcag

SEQ ID NO: 8903 - DNA, 367 bp, Homo sapiens
gaggtgcagctgttggagtctgggggaggcttggtacagcctggggggtccctgagactctcctgtgcagcctctggattcacctttagcagctatgccatgagctgggtccgccaggctccagggaaggggctggagtgggtctcagctattagtggtagtggtggtagcacatactacgcagactccgtgaagggccggttcaccatctccagagacaattccaagaacacgctgtatctgcaaatgaacagcctgagagccgaggacacggccgtatattactgtgcgaaagggctacgatattttgactggttatccccctttgactactggggccagggaaccctggtcaccgtctcctcag

SEQ ID NO: 8904 - DNA, 367 bp, Homo sapiens
caggtgcagctggtggagtctgggggaggcgtggtccagcctgggaggtccctgagactctcctgtgcagcgtctggattcaccttcagtagctatggcatgcactgggtccgccaggctccaggcaaggggctggagtgggtggcagttatatggtatgatggaagtaataaatactatgcagactccgtgaagggccgattcaccatctccagagacaattccaagaacacgctgtatctgcaaatgaacagcctgagagccgaggacacggctgtgtattactgtgcgagagatcgcgtcgtctacgatttttggagtggtccctactactggggccagggaaccctggtcaccgtctcctcag

SEQ ID NO: 8905 - DNA, 365 bp, Homo sapiens
caggtgcagttggtggagtctgggggaggcgtggtccagcctggggggtccctgagactctcctgtgcagcgtctggattcaccttcagtagctatggcatgcactgggtccgccaggctccaggcaaggggctggagtgggtggcagttatttggtatgatgcaagtaatatatactatgcagactccgtgaagggccgattcaccatctccagagacaattccgagaacacgctgtatttgcaaatgaacagcctgagagtcgaggacacggctgtgtattactgtgcgagagatctcccagcattggctgaccacaatgggtttgacgactggggccagggaaccctggtcaccgtctcctc

SEQ ID NO: 8906 - DNA, 367 bp, Homo sapiens
gaggtgcagctggtggagtctgggggaggcctggtcaagcctggggggtccctgagactctcctgtgcagcctctggattcaccttcagtaactatagcatgaactgggtccgccaggctccagggaaggggctggagtgggtctcatccattagtagtagtagtagttacatatactacgtagactcagtgaagggccgattcaccatctccagagacaacgccaagaactcactgtatctgcaaatgaatagcctgagagtcgaggacacggctgtgtattactgtgcgagagaccctagttactacagcaacctgtactactttgactactggggccagggaaccctggtcaccgtctcctcag

SEQ ID NO: 8907 - DNA, 396 bp, Homo sapiens
gaggtgcagctggtggagtctgggggaggcttggtccagcctggggggtccctgagactctcctgtgcagcctctggattcaccgtcagtagcaactacatgagctgggtccgccaggctccagggaaggggctggagtgggtctcagttatttatagcggtggtagcacatactacgcagactccgtgaagggcagattcaccatctccagagacaattccaagaacacgctgtatcttcaaatgaacagcctgagagccgaggacacggctgtgtattactgtgcgagagatcgatggttccccactacagtaacgtacatggggtccccgtcccgatactactactacggtatggacgtctggggccaagggaccacggtcaccgtctcctca

SEQ ID NO: 8908 - DNA, 366 bp, Homo sapiens
caggtgcagttggtgcagtctggggttgaggtgaagacgcctggggcctcagtgaaggtttcctgcaaggcatctggatacaccttcaccaactactatgtacactggctgcgacaggcccctggccaagggcttgagtggattggagtggtcaaccctagtgctgttaccacaacctacggacagaagttccagggcagagtcaccatgaccagtgacacgtccacgagcacggtctacatggagctgagcagcctgaaatctgaggacacggccgtctattactgtgcgcgagagggctcaattagtcgatcttacgacggtatggacgtctggggccaagggaccacggtcaccgtctcctca

SEQ ID NO: 8909 - DNA, 366 bp, Homo sapiens
caggtgcagctggtggagtctgggggaggcgtggtccagcctgggaggtccctgagactctcctgtgcagcgtctggattcaccttcagtagctatggcatgcactgggtccgccaggctccaggcaaggggctggagtgggtggcagttatatggtatgatggaagtaataaatactatgcagactccgtgaagggccgattcaccatctccagagacaattccaagaacacgctgtatctgcaaatgaacagcctgagagccgaggacacggctgtgtattactgtgcgagaggcccttacgatttttggagcgtgggcggtatggacgtctggggccaagggaccacggtcaccgtctcctca

SEQ ID NO: 8910 - DNA, 369 bp, Homo sapiens
caggtgcagctgcaggagtcgggcccaggactggtgaagccttcacagaccctgtccctcacctgcactgtctctggtggctccatcagcagtggtggttactactggagctggatccgccagcacccagggaagggcctggagtggattgggtacatctattacagtgggagcacctactacaacccgtccctcaagagtcgagttaccatatcagtagacacgtctaagaaccagttctccctgaagctgagctctgtgactgccgcggacacggccgtgtattactgtgcgagagtccccgtggtttacgaggtagcccagggtgtggacgtctggggccaagggaccacggtcaccgtctcctca

SEQ ID NO: 8911 - DNA, 372 bp, Homo sapiens
gaggtgcagctggtggagtctgggggaggcttggtccagcctggagggtccctgagactctcctgtgcagcctctggagtcaccttcagtgaccactacatggactgggtccgccaggctccagggaaggggctggagtgggttggccgtattagaaacaaagctaacagttacaccacagaagacgccgcgtctgtgaaaggcagattcaccatctcaagagatgattcaaagaactcactgtatctgcaaatgaacagcctgaaaaccgaggacacggccgtgtattattgtgttagagtccagcgctatagtgggagatactacactatggatgtctggggccaagggaccacggtcaccgtctcctca

SEQ ID NO: 8912 - DNA, 369 bp, Homo sapiens
caggtcaccttgagggagtctggtcctgcgctggtgaaacccacacagaccctcacactgacctgcaccttctctgggttctcactcagcactagtggaatgtgtgtgagctggatccgtcagcccccagggaaggccctggagtggcttgcacgcattgattgggatgatgataaatactacagcacatctctgaagaccaggctcaccatctccaaggacacctccaaaaaccaggtggtccttacaatgaccaacatggaccctgtggacacagccacgtattactgtgcacggacgtatagcagcagctggtactactacggtatggacgtctggggccaagggaccacggtcaccgtctcctca

SEQ ID NO: 8913 - DNA, 367 bp, Homo sapiens
gaggtgcagctggtgcagtctggagcagaggtgaaaaagccgggggagtctctgaagatctcctgtaagggttctggatacagctttattaactactggatcggctgggtgcgccagatgcccgggaaaggcctggagtggatgggtttcatgtatcctggtaactctgataccagatacagcccgtccttccaaggccaggtcaccatttcagccgacaagtccatcactaccgcctacctgcagtggagcagcctgaaggcctcggacaccgccatctattactgtgcgagactcgggggggggtaccaccgtgacaactggttcgacccctggggccagggcaccctggtcaccgtctcctcag

SEQ ID NO: 8914 - DNA, 367 bp, Homo sapiens
caggtgcagctggtgcagtctggggctgaggtgaagaagcctggggcctcagtgaaggtctcctgcaaggcttctggatacaccttcaccgtctactatatgcactgggtgcgacaggcccctggacaagggcttgagtggatgggatggatcaaccctaacagtggtggcacaaagtatgcacagaagtttcagggcagggtcaccgtgaccagggacacgtccatcagcacagcctacatggagctgagcaggctgagatctgacgacacggccgtgtattattgtgcgagagatacggggagtagttatttggatggttggttcgacccctggggccagggaaccctggtcaccgtctcctcag

SEQ ID NO: 8915 - DNA, 367 bp, Homo sapiens
gaggggcagttggtggagtctgggggaggcttggtccagcctggggggtccctgagactctcttgtgtagcctctggattcacctttagtaactactggatgagctgggtccgccagcctccagggaaggggctggaatgggtggccaatgtaaagggagatggaagtgacaagtactatgtggagtctgtgaagggccgattcaccatctctagagataacgccaggaactcactctttctgcaaatgaatagcctgagagccgaagacacggctatctattactgtgcgaaagacgtccgacaggggactcagtacagctccttcgactcttggggccagggaaccctggtcaccgtctcctcag

SEQ ID NO: 8916 - DNA, 364 bp, Homo sapiens
caggtgcagctgcaggagtcgggcccaggactggtgaagccttcggagaccctgtccctcacctgcactgtctctggtggctccatcagtagttactactggagctggatccggcagcccgccgggaagggactggagtggattgggcgtatctataccagtgggagcaccaactacaacccctccctcaagagtcgagtcaccatgtcagtagacacgtccaagaaccagttctccctgaagctgagctctgtgaccgccgcggacacggccgtgtattactgtgcgagaggtcgagcctatggttatacccactggtacttcgatctctggggccgtggcaccctggtcactgtctcctcag

SEQ ID NO: 8917 - DNA, 378 bp, Homo sapiens
caggtgcagctgcaggagtcgggcccaggactggtgaagccttcggagaccctgtccctcacctgcactgtctctggtacctccattaaaacttactactggagttggatccggcagcccgccgggaagggactggagtggattgggcgtatcgataccagtgggagcaccacctacaacccctccctcaagagtcgagtcaccatgtcagtagacacgtccaagaaccagttctccctgacgctgagctctgtgaccgccgcggacacggccgtatattactgtgcgagagatcacattacggtttttggagtggttattacggactatcagggtctggacgtctggggccaagggaccacggtcaccgtctcctca

SEQ ID NO: 8918 - DNA, 373 bp, Homo sapiens
gaggtgcagctggtggagtctgggggaggcttggtaaagcctggggggtcccttagactctcctgtgcagcctctggattcatttttagtagcgcctgggtgacctgggtccgccaggctccagggaagggactggaatgggttggccgtattaaaagcaaaatcagtggtgggacaacagactacgctgcacccgtgaaaggcagattcaccatttcaagagatgattcaagaaacacgctgtatctgcaaatgaacagcctgaaagccgaggacacagccgtatattactgtacgacagatattttatggtccggggaggggagctacttccaatactggggccagggcaccccggtcaccgtctcctcag

SEQ ID NO: 8919 - DNA, 387 bp, Homo sapiens
caggtacagctgcagcagtcaggtccagggctggtgatgccctcgcagaccctctcactcacctgtaccatctccggggacagtgtctctaggaacactgatgcttggaactggatcaggcagtccccatcgagaggccttgagtggctaggaaggacatattacaggtccaagtggtatagtgattatgcactatctgtgaaaagtcgaataaccatcaacccagacacatccaagaaccagttctccctgcagctgaaatctgtgactcccgaggacacggctgtgtattactgtgcaagagaagtgggtatagcagtggctggtatctactactactacggtatggacgtctggggccaagggaccacggtcaccgtctcctca

SEQ ID NO: 8920 - DNA, 378 bp, Homo sapiens
gaggtgcagctggtgcagtctggagcagaggtgaaaaagcccggggagtctctgaagatctcctgtaagggttctggatacagctttaccagctactggatcggctgggtgcgccagatgcccgggaaaggcctggagtggatggggatcatctatcctggtgactctgataccagatacagcccgtccttccaaggccaggtcaccatctcagccgacaagtccatcagcaccgcctacctgcagtggagcagcctgaaggcctcggacaccgccatgtattactgtgcgagacatagggatacagctatggtatggcaatactactactacggtatggacgtctggggccaagggaccacggtcaccgtctcctca

SEQ ID NO: 8921 - DNA, 381 bp, Homo sapiens
cagctgcagctgcaggagtcgggcccaggactggtgaagccttcggagaccctgtccctcacctgcactgtctctggtggctccatcagcagtagtagttactactggggctggatccgccagcccccagggaaggggctggagtggattgggagtatctattatagtgggagcacctactacaacccgtccctcaagagtcgagtcaccatatccgtagacacgtccaagaaccagttctccctgaagctgagctctgtgaccgccgcagacacggctgtgtattactgtgcgagacgcgattacgatttttggagtggttatgaaacacactacggtatggacgtctggggccaagggaccacggtcaccgtctcctca

SEQ ID NO: 8922 - DNA, 378 bp, Homo sapiens
gaggtgcagctgttggaatctgggggaggcttggtacagcctggggggtccctgagactctcctgtgcagcctctggattcatctttagcagatatgacatgagctgggtccgccaggctccagggaaggggctggagtgggtctcagctattagtggcagtggtggtagtacatactacgcagactccgtgaagggccacttcaccatctccagagacaattccaagaacactctgtatgtgcaaatgatcagcctgagagccgaggacacggccgtatattactgtgcgagagctagcatatatggttcggggagttattatatcctccacggtatggacgtctggggccaagggaccacggtcaccgtctactca

SEQ ID NO: 8923 - DNA, 378 bp, Homo sapiens
gaagtgcagctggtggagtctgggggaggcttggaacagcctggcaggtccctgaggctctcctgtgcagcctctggattcacctttgatgattatgccatgcactgggtccggcaacctccagggaagggcctggagtgggtctcaggtattagttggaatagtggtgacatggactatgcggactctgtgaggggccgattcaccatctccagagacaacgccaagaactccctgtatctgcaaatgaacagtctgagaactgaggacacggccttatattactgtgcaaaagatgtaagggggcattacgatattttgactggttataggggtatggacgtctggggccaagggaccacggtcaccgtctcctca

SEQ ID NO: 8924 - DNA, 378 bp, Homo sapiens
gaagtgcagttggtggagtctgggggaggcttggtacagcctggcaggtccctgagactctcctgtgcagcctctggattcagctttgatgattatgccatgcactgggtccggcaagctccagggaagggcctggagtgggtctcaggtattagttggaatggtggtatcatagactatgcggactctgtgaagggccgattcaccatctccagagacaacgccgacaactccctgtatctgcaaatgaaccgtctgagaactgaggacacggccttgtattactgtgcaaaagatatcgtcccccttgagggtgggaggtactaccccttcggtatggacgtctggggccaagggaccacggtcaccgtctcctca

SEQ ID NO: 8925 - DNA, 369 bp, Homo sapiens
ctggtggagtctgggggaggcttggtccagcctggggggtccctgagactctcctgtgcagcctctggattcacctttagttacaattccatgacctgggtccgccaggctccagggaaggggctggagtgggtggccaacataaagcaagatgggagtgagaaatactatgtggactctgtgaagggccgattcaccatctccagagacaacgccaggaactcactgtatctgcaaatgaacagcctgagagccgaggacacggctgtgtattactgtgcgagactatgggcgtggaccccacgtcgacaaacatactactactacatggacgtctggggcaaagggaccacggtcaccgtctcctca

SEQ ID NO: 8926 - DNA, 377 bp, Homo sapiens
gaggtgcagctggtggagtctgggggaggcttggtccagcctggggggtccctgagactctcctgtgcagcctctggattcacctttagtaactattggatgagctgggtccgccaggctccagggaaggggctggagtgggtggccaacataaaacaagatggaagtgaggaatactatgtggactctgtgaagggccgattcaccatcaccagagacaacgccaagaactcactgtatctgcaaatgaacagcctgagagtcgaggacacggctgtgtattactgtgcgagagcttcgtattacgatttttggattggcatgacccactacggtatggacgtctggggccaagggaccacggtcaccgtctcctc

SEQ ID NO: 8927 - DNA, 378 bp, Homo sapiens
caggtgcagctggtggagtctgggggaggcgtggtccagcctggagagtccctcagactctcctgtgcagcctctggattctccttcagtagctctgctatgcactgggtccgccaggctccaggcaaggggctggcgtgggtggcaattatgtcatatgatggaggcaataaatactacgcagactccgtgaagggccgattcaccatctccagagacaattccagaaacacgctgtggctgcaaatggacaccctgagagctgaggacacggctgtgtattactgtgcgggagcgttcagacgttccgtagtacctgctaactactactaccacatggacgtctggggcaaagggaccacggtcaccgtctcctca

SEQ ID NO: 8928 - DNA, 381 bp, Homo sapiens
caggtgcagctgcaggagtcgggcccaggactggtgaagccttcacagaccctgtccctcacctgcactgtctctggtggctccatcagcagtggtggttactactggagctggatccgccagcacccagggaagggcctggagtggattgggtacatctattacagtgggagcacctactacaacccgtccctcaagagtcgagttaccatatcagtagacacgtctaagaaccagttctccctgaagctgagctctgtgactgccgcggacacggccgtgtattactgtgcgaggggatactatgatagtagtggttattactactactactactacatggacgtctggggcaaagggaccacggtcaccgtctcctca

SEQ ID NO: 8929 - DNA, 384 bp, Homo sapiens
gaggttcagttggtggagtctgggggaggcttggtacagccagggcggtccctgagactctcctgtacaacttctggattcacctttggtgattatgctatgagctggttccgccaggctccagggaaggggctggagtgggtaggtttcattaggagcgaagtttatggtgggacaacagaatacgccgcgtctgtgaaaggcagattcagcatctcaagagatgattccagaagtatcgcctatctgcaaatgagtagcctgaaaaccgaggacacagccgtgtattattgtactagagatggtggttattatggttcggggagttcccactattactacatggacgtctggggcaaagggaccacggtcaccgtctcctca

SEQ ID NO: 8930 - DNA, 367 bp, Homo sapiens
gaggtgcacctggtggagtctgggggaggcttggtccagcctggggggtccctgagactctcctgtgcagcctctagattcaccttcagtagctttgctatgcactgggtccgccaggctccagggaagggactggaatatgtttcagctattagtagtaatgggggtagcacatattatgcagactctgtgaaggacagattcaccatctccagagacaattccaagaacacgctgtatcttcaaatgggcagcctgagatctgaagacatgggtgcttattactgtgcgagaggggccggggacctactctggaatggtgcttttgatatctggggccgagggacaatggtcaccgtctcttcag

SEQ ID NO: 8931 - DNA, 379 bp, Homo sapiens
caggtccacctggtggagtctgggggaggcgtggtccagcctggggggtcactgagactctcctgtgcagcctctggattcatgttcaatctctatggcatgcactgggtccgccaggctccaggcaaggggctggagtgggtggcccttatatcctatgatggagcttataaatactatgcggactccgtggagggccgattcaccatctccagagacaattacgacaacaaggtgcatctacagataaacagcctgaaaactggggacacggctctgtattactgtgcgaaagatcgttgggcaggctatgcctacggtgacaatgtccctccgtgtgacttgtggggccagggaaccctggtctccgtctcctcag

SEQ ID NO: 8932 - DNA, 378 bp, Homo sapiens
caggttcagctggtgcagtctggagctgaggtgaagaagcctggggcctcagtgaaggtctcctgcaaggcttctggttacacctttaccagctatggtatcagctgggtgcgacaggcccctggacaagggcttgagtggatgggatggatcagcgcttacaatggtaacacaaactatgcacagaagctccagggcagagtcaccatgaccacagacacatccacgagcacagcctacatggagctgaggagcctgagatctgacgacacggccgtgtattactgtgcgagagatccttcctcgagtgggagctacaactactactactactacatggacgtctggggcaaagggaccacggtcaccgtctcctca

SEQ ID NO: 8933 - DNA, 378 bp, Homo sapiens
caggttcagctggtgcagtctggagctgaggtgaagaagcctggggcctcagtgaaggtctcctgcaaggcttctggttacacctttaccagctatggtatcagctgggtgcgacaggcccctggacaagggcttgagtggatgggatggatcagcgcttacaatggtaacacaaactatgcacagaagctccagggcagagtcaccatgaccacagacacatccacgagcacagcctacatggagctgaggagcctgagatctgacgacacggccgtgtattactgtgcgagatccccatgggggggatattgtagtagtaccagctgctatggggaggacgtctggggccaagggaccacggtcaccgtctcctca

SEQ ID NO: 8934 - DNA, 376 bp, Homo sapiens
gaggtgcagctggtggagtctggaggaggcttgatccagcctggggggtccctgagactctcctgtgcagcctctgggttcaccgtcagtagcaactacatgagctgggtccgccaggctccagggaaggggctggagtgggtctcagttatttatagcggtggtagcacatactacgcagactccgtgaagggccgattcaccatctccagagacaattccaagaacacgctgtatcttcaaatgaacagcctgagagccgaggacacggccgtgtattactgtgcgagagagagccggggccaccaggcgggatacagctatggttactactttgactactggggccagggaaccctggtcaccgtctcctcag

SEQ ID NO: 8935 - DNA, 379 bp, Homo sapiens
caggtgcagctggtggagtctgggggaggcgtggtccagcctgggaggtccctgagactctcctgtgcagcctctggattcaccttcagtagctatgctatgcactgggtccgccaggctccaggcaaggggctggagtgggtggcagttatatcatatgatggaagcaataaatactacgcagactccgtgaagggccgattcaccatctccagagacaattccaagaacacgctgtatctgcaaatgaacagcctgagagctgaggacacggctgtgtattactgtgcgagaggaggggatattgtagtagtaccagctgcttatccagatgcttttgatatctggggccaagggacaatggtcaccgtctcttcag

SEQ ID NO: 8936 - DNA, 379 bp, Homo sapiens
gaggtgcagctggtgcagtctggagcagaggtgaaaaagccgggggagtctctgaagatctcctgtaagggttctggatacagctttaccagctactggatcggctgggtgcgccagatgcccgggaaaggcctggagtggatggggatcatctatcctggtgactctgataccagatacagcccgtccttccaaggccaggtcaccatctcagccgacaagtccatcagcaccgcctacctgcagtggagcagcctgaaggcctcggacaccgccatgtattactgtgcgagaaccccactcgagtaccagctgctatacgtccccaggggtgcttttgatatctggggccaagggacaatggtcaccgtctcttcag

SEQ ID NO: 8937 - DNA, 379 bp, Homo sapiens
gaggcgcagctgttggagtctgggggaggcttggtacagcctggggggtccctgagactctcctgtgcagtctctggattcacctttaccagttatgccatgacctgggtccgccaggctccagggaaggggctagagtgggtctcaactattagtggtagtgctggtagcacatactacgcagactccgtgaagggccggttcaccacctccagagacaattccaagaacacgctgtatctgcaaatgaacagcctgagagccgaggacacggccgtattttactgtgcgagagatctgcactttgatagtcgtggttacaactacgagggggcttttgatatctggggccaagggacaatggtcaccgtctcttcag

SEQ ID NO: 8938 - DNA, 379 bp, Homo sapiens
gaggtgcagctgttggagtctgggggaggcttggtacagcctggggggtccctgagactctcgtgtgcagcctctggattcttctttagtaactctcccatgacctgggtccgccaggctccagggaaggggctggagtgggtctcagctattagtgaaaatggtggaggtaaatactacgcagactccgtgaagggccggctcaccatctccagagacaattccaagaacacgctgtatctgcaaatgaacagcctgagagccgacgacacggccgtatattactgtgcgaaaggcccgcagaagtatgtaggtggtagttattattattatggtctcgactcctggggccagggaaccctggtcaccgtctcctcag

SEQ ID NO: 8939 - DNA, 379 bp, Homo sapiens
gaggtgcagctggtggagtctgggggaggcctggtcaagcctggggggtccctgagactctcctgtgcagcctctggattcaccttcagtagctatagcattaactgggtccgccaggctccagggaaggggctggagtgggtctcatccattagtagtggtagtgattacatatactacgcagactcagtgaagggccgattcaccatctccagagacaacgccaagaactcactgtatctgcaaatgaacagcctgagagtcgaggacacggctgtgtattactgtgcgagagatcggggggattgtagtggtggtagctgctaccccaactggttcgacccctggggccagggaaccctggtcaccgtctcctcag

SEQ ID NO: 8940 - DNA, 349 bp, Homo sapiens
caggtgcagctgcaggagtcgggcccaggactggtgaagccttcggagaccctgtccctcacctgcactgtctctggtggctccatcagtagttactactggagctggatccggcagcccccagggaagggactggagtggattggatatatctattacactgggagcaccaactacaacccctccctcaagagtcgagtctccatatcagtagacacgtccaagaaatacttctccctgaacctgaactctgtgaccgctgcggacacggccgtgtattactgtgcgagaggtggcagggtgtcagccgtttactggggccagggaacccgggtcaccgtctcctcag

SEQ ID NO: 8941 - DNA, 355 bp, Homo sapiens
cagctgcagctgcaggagtcgggcccaggactggtgaagccttcggagaccctgtccctcacctgcactgtctctggtggctccatcagcagtagtagttactactggggctggatccgccagcccccagggaaggggctggagtggattgggagtatctattatagtgggagcacctactacaacccgtccctcaagagtcgagtcaccatatccgtagacacgtccaagaaccagttctccctgaagctgagctctgtgaccgccgcagacacggctgtgtattactgtgcgaggctatggaagggagtccctgactactggggccagggaaccctggtcaccgtctcctcag

SEQ ID NO: 8942 - DNA, 367 bp, Homo sapiens
gaagtgcagctggtggagtctgggggaggcttggtacagcctggcaggtccctgagactctcctgtgtagtctctggattcacctttgatgattatgccatgcactgggtccggcaagctccagggaagggcctggagtgggtctcaggtattagttggaatagtggtaccataggctatgcggactctgtgaagggccgattcaccatctccagagacaacgccaagaactccctgtatctgcaaatgaacagtctgagagctgaggacacggccttgtattactgtgcaaaagatatcgggtcaggggagcagcaactggtacttgactactggggccagggaaccctggtcaccgtctcctcag

SEQ ID NO: 8943 - DNA, 352 bp, Homo sapiens
caggtgcagctggtggagtcggggggaggcgtggtccagcctgggaggtccctgagactctcctgtgcagcgtctggattcaccttcagtagttatggcatgcactgggtccgccaggctccaggcaaggggctggagtgggtggcagttatatggtttgatggaagtaagaaatactatgcagactccgtgaagggccgattcaccctctccagagacaactccaagaacaccctatatctgcaaatgaacagcctgagagccgaggacacggctgtgtattactgtgcgagagatgagatggccaagtttgactactggggccaggggaccctggtcaccgtctcctcag

SEQ ID NO: 8944 - DNA, 352 bp, Homo sapiens
caggtgcagctggtggagtctgggggaggcgtggtccagcctgggaggtccctgagactctcctgtgcagcgtctggattcaccttcagtagctatggcatgcactgggtccgccaggctccaggcaaggggctggagtgggtggcagttatatggtatgatggaagtaataaatactatgcagactccgtgaagggccgattcaccatctccagagacaattccaagaacacgctgtatctgcaaatgaacagcctgagagccgaggacacggctgtgtattactgtgcgagagaggagctgctatcccttgactactggggccagggaaccctggtcaccgtctcctcag

SEQ ID NO: 8945 - DNA, 352 bp, Homo sapiens
caggtgcagctggtgcagtctggggctgaggtgaagaagcctggggcctcagtgaaggtctcctgcaaggcttctagatacaccttcaccggctactatatgcactgggtgcgacaggcccctggacaagggcttgagtggatgggatggatcaaccctaatagtggtgtcacaaactatgcacagaagtttcaggacagggtcaccatgacctgggacacgtccatcagcacagcctacatggaactgagtcggctgagatctgacgacacggccgtgtttttctgtgcgacagaaaagagggggaactttgactactggggccagggaaccctggtcaccgtctcctcag

SEQ ID NO: 8946 - DNA, 349 bp, Homo sapiens
gaggtgcagctggtggagtctgggggaggcttggtccagcctggggggtccctgagactctcctgtgcagcctctggattcaccgtcagtagcaactacatgagctgggtccgccaggctccagggaaggggctggagtgggtctcaattatttatagcggtggtactacatactacgcagactccgtgaagggcagattcaccatctccagagacaattccaagaacacgctgtatcttcaagtgaacagcctgagagccgaggacacggctgtgtattactgtgcgagagagtcccgggatgcttttgatatctggggccaagggacaatggtcaccgtctcttcag

SEQ ID NO: 8947 - DNA, 352 bp, Homo sapiens
gaggtgcagctgttggagtctgggggaggcttggtacagcctggggggtccctgagactctcctgtgcagcctctggattcacctttagcagctatgccatgagctgggtccgccaggctccagggaaggggctggagtgggtctcagctattagtggtagtggtggtagcacatactacgcagactccgtgaagggccggttcaccatctccagagacaattccaagaacacgctgtatctgcaaatgaacagcctgagagccgaggacacggccgtatattactgtgcgaacacccagtggtggtggagtgactactggggccagggaaccctggtcaccgtctcctcag

SEQ ID NO: 8948 - DNA, 352 bp, Homo sapiens
gaggtgcagctgttggagtctgggggaggcttggtacagcctggggggtccctgagactctcctgtgcagcctctggattcacctttagcagctctgccatgagctgggtccgccaggctccagggaaggggctggagtgggtctcaagtattagtggtactactggtgtcaaatactacgcagactccgtgaagggccggttcaccatctccagagacaactccaagaacacgctgattctgcaaatgagcagcctgagagccgaggacacggctgtatattactgtgcgtcccgggggcgttattactttgactactggggccagggaaccctggtcaccgtctcctcag

SEQ ID NO: 8949 - DNA, 349 bp, Homo sapiens
gaggtgcagctgttggagtctgggggaggcttggtacagcctggggggtccatgagactctcctgtgcagcctctggatccacctttaacaactatgccatgagctgggtccgccaggctccagggaaggggctggagtgggtctcaactattagtagtggtggtgccacatactacgcagactccgtgaagggccggttcaccatctccagagacaattccaaggaagcgctttatttgcagatgaacagcctgagagccgaggacacggccgtatattactgtgcgaaaggaaaccgaggcagtggctggtactggggccagggaaccctggtcaccgtctcctcag

SEQ ID NO: 8950 - DNA, 352 bp, Homo sapiens
gaggcgcaggtagtggagtctgggggaggcctggtacagccgggggggtccctgagactctcctgtgtagcctcgggattcatcttcaggaacgaccccatgaactgggtccgccaggctccagggaaggggttggagtggctttcaaatattagaagtagtggtgatgacacatattacgcagaccctgtgaagggccgattcaccatctccagagacaacgccaagaactctttgtatttgcaaatgaacagcctgagacccgaggacacggctgtgtattactgtgtgagagatactttctatgcttttgatatctggggccaaggggcaatggtcaccgtctcctcag

SEQ ID NO: 8951 - DNA, 348 bp, Homo sapiens
caggtgcagctgcaggagtcgggctcaggactggtgaagccttcggagaccctgtccctcacttgcactgtctctggtggctccatgaataatctcttctggagttggatccgacagtccccagggaagggactggagtggattggctatgtctattacagtgggagcaccaggtacaatccctccctcaagagtcgagtcaccatgtcagcagacacgtccaagaaccagttctccctgaggctgacctctgtgaccgctgcggacacggccgtttatttctgtgcgagattcgggtacttctccttggacgtctggggcaaaggggccacggtcatcgtctcctca

SEQ ID NO: 8952 - DNA, 367 bp, Homo sapiens
gaggtgcagctgttggagtctgggggaggcttggtacagcctggggggtccctgagactctcctgtgcagcctctggattcacctttagcagctatgccatgagctgggtccgccaggctccagggaaggggctggagtgggtctcagctattagtggtagtggtggtagcacatactacgcagactccgtgaagggccggttcaccatctccagagacaattccaagaacacgctgtatctgcaaatgaacagcctgagagccgaggacacggccgtatattactgtgcgaaattacagtacctgcaggtggtggggtactggttcgacccctggggccagggaaccctggtcaccgtctcctcag

SEQ ID NO: 8953 - DNA, 367 bp, Homo sapiens
gaggtgcagctgttggagtctgggggaggcttggtacagcctggggggtccctgagactctcctgtgcagcctctggattcacctttagcagctatgccatgagctgggtccgccaggctccagggaaggggctggagtgggtctcagctattagtggtagtggtggtagcacatactacgcagactccgtgaagggccggttcaccatctccagagacaattccaagaacacgctgtatctgcaaatgaacagcctgagagccgaggacacggccgtatattactgtgcgacaccatcttaccagctgctatggaacaactggttcgacccctggggccagggaaccctggtcaccgtctcctcag

SEQ ID NO: 8954 - DNA, 363 bp, Homo sapiens
gaggtgcaactgttggagtctgggggaggcctggtacagcctggggggtccctgagactctcctgtgcagcctcaggattcagttttagcacctatgccatgacctgggtccgccaggctccagggaaggggctggagtgcgtctcagtcattagtggtggtggtggtgtcacgtgctttccagactccgtgaagggccggttcagcatctccagagactgttccaggaacacgctgtatcttgaaatgattggcctgagagccgacgacacggccatatattactgtgcgaaacggggggtcaaggtggaaactaccccgctttgactgctggggccagggagtcctggtcaccgtctcctc

SEQ ID NO: 8955 - DNA, 361 bp, Homo sapiens
cagatcaccttgaaggagtctggtcctacgctggtgaaacccacacagaccctcacgctgacctgcaccttctctgggttctcactcagcactggtggagtgggtgtgggctggatccgtcagcccccaggaaaggccctggagtggcttgcactcatttattggaatgatgataagcgttacagcccatctctgaagagcaggctcaccatcaccaaggacacctccaaaaaccaggtggtccttacaatgaccaacatggaccctgtagacacagccacatattactgtgcacacaaggacgcggctacgctcccccctgtgcactggggccagggaaccctggtcaccgtctcctcag

SEQ ID NO: 8956 - DNA, 358 bp, Homo sapiens
caggtgcagctggtgcagtctggggctgaggtgaagaagcctggggcctcagtgaaggtctcctgcaaggcttctggataccccttcatcagttatgatatccactgggtgcgacaggccactggacaagggcttgagtggatgggatggatgaaccctaacaatggtaacgcaggctatgcacagaagttccagggcagaatcaccatgaccagggacacctccataaccacagcctacatggagctgagcagcctgagatctgaggacacggccgtgtattattgtgcgagagaatggggtgttcggggagctactgactcctggggccagggaagcctggtcaccgtctcctcag

SEQ ID NO: 8957 - DNA, 358 bp, Homo sapiens
caggtccagctggtgcagtctggggctgaggtgaagaagcctgggtcctcggtgaaggtctcctgcaaggcttctggaggcaccttcagcagctatgctatcagctgggtgcgacaggcccctggacaagggcttgagtggatgggaaggatcatccctatccttggtatagcaaactacgcacagaagttccagggcagagtcacgattaccgcggacaaatccacgagcacagcctacatggagctgagcagcctgagatctgaggacacggccgtgtattactgtgcgagcggcgggttctatgatagtaggattgactactggggccagggaaccctggtcaccgtctcctcag

SEQ ID NO: 8958 - DNA, 357 bp, Homo sapiens
aggtgcagctggtggagtctgggggaggcctggtcaagcctggggggtccctgagactctcctgtgcagcctctggattcaccttcagtagctatgacatgcactgggtccgccaggctccaggcaaggggctggagtgggtggcagttatatcatatgatggaagtaataaatactatgcagactcagtgaagggccgattcaccatctccagagacaacgccaagaactcactgtatctgcaaatgaacagcctgagagccgaggacacggctatgtatttctgtgcgagattccggggagtcaactactactttgactactggggccagggaaccctggtcaccgtctcctcag

SEQ ID NO: 8959 - DNA, 361 bp, Homo sapiens
caggtgcagctgcaggagtcgggcccaggactggtgaagccttcacagaccctgtccctcacctgcactgtctctggtggctccatcagcagtgatgattactactggagttggatccgccagcccccagggaagggcctggagtggattgggtacatctattatagtggaagcacctactacaacccgtccctcaagagtcgagttaccatatcagtagacacgtccaagaaccagttctccctgaagctaagctctgtgactgccgcagacacggccgtgtattattgtgccagagacgtagtgggagttaggagatttgactactggggccagggaaccctggtcaccgtctcctcag

SEQ ID NO: 8960 - DNA, 355 bp, Homo sapiens
caggtgcaactgcaggagtcgggcccaggactggtgaagccttcggagaccctgtccctcacctgcactgtctctgatgactccttcacttatccctactgggcctggatccgacagcccgccgggaagggactggagtgggttgggcgtattcattccagagggtacaccagctacaacccctccctcaggagtcgaatcaccatgtcaatggacacgtccaagaagcagttctccctgaggctgagttctgtgaccgccgcggacacggccgtttattactgtgcgagagacccccaaatcggcggtttctttgactattggggccagggaaccctggtctccgtctcctcag

SEQ ID NO: 8961 - DNA, 355 bp, Homo sapiens
caggtgcagctgcaggagtcgggcccaggactggtgaagccttcggagaccctgtccctcacctgcactgtctctggtggctccatcagtagttactactggagctggatccggcagcccccagggaagggactggagtggattggctatgcctcttacagtgggggcaccaactacaacccctccctcaagagtcgagtcaccttatcattagacacgtccagaaaccagttctccctgaagctgagctctgtgaccgctgcggacacggccgtgtattactgtgcgagcggttttgactcctttaactaccgcgactactggggcccgggaaccctggtcaccgtctcctcag

SEQ ID NO: 8962 - DNA, 355 bp, Homo sapiens
caggtgcagctgcaggagtcgggcccaggactggtgaagccttcggagaccctgtccctcacctgcactgtctctggtggctccatcagtagttactactggagctggatccggcagcccccagggaagggactggagtggattgggtatatctattacagtgggagcaccaactacaacccctccctcaagagtcgagtcaccatatcagtagacacgtccaagaaccagttctccctgaagctgagctctgtgaccgctgcggacacggccgtgtattactgtgctcatagcagcagctggtaccctacctttgactactggggccagggaaccctggtcaccgtctcctcag

SEQ ID NO: 8963 - DNA, 358 bp, Homo sapiens
caggtgcagctggtgcagtctggggctgaggggaagaaacctggggcctcagtgagggtctcctgcaaggcttctggatacatcttcaccggctaccatatgcactgggtgcgactggcccctggacaaggacttgagtggttgggatggatcaaccctaacagtggtggcacaaactatgcacaggagtttcagggcagggtcaccatgaccagggacacgtccattagtacaatctacatggagctgagcaggctgagatctgacgacacggccgtgtattattgtgcgagagaaaaagggagcaacgccgactttgactactggggccagggaaccctggtcaccgtctcctcag

SEQ ID NO: 8964 - DNA, 358 bp, Homo sapiens
gaggtgcagctggtggagtctgggggaggcttggtacagcctggggggtccctgagactctcctgtgcagcctctggattcaccttcagtagctatagcatgaactgggtccgccaggctccagggaaggggctggagtgggtttcatacattagtagtagtagtagtaccatatactacgcagactctgtgaagggccgattcaccatctccagagacaatgccaagaactcactgtatctgcaaatgaacagcctgagagacgaggacacggctgtgtattactgtgcgagagtcttcgattactatgacgctaatgactactggggccagggaaccctggtcaccgtctcctcag

SEQ ID NO: 8965 - DNA, 358 bp, Homo sapiens
gaggtgcagttggtggagtctgggggaggctcattacagcctggggggtccctgagactctcctgtgcagcctctggattcgccttcgatagctatagcatgaactgggtccgccaggctccagggaaggggctggagtggctttcatacattaatagttttgctaatagcatatactacgcagactctgtgaagggccgattcaccatctccagagacaatgccaagaactcactgtttctacaaataaacagcctgagagccgaggacacggctgtgtattactgtgcgaggtcccacggtggtccttactactttgactactggggccagggaaccctggtcaccgtctcctcag

SEQ ID NO: 8966 - DNA, 358 bp, Homo sapiens
gaggtgcaactggtggagtctgggggaggcgtggtacagcctggggggtccctgagactctcctgtgcagcctctggattcaccttcagtgactataacatgaactgggtccgccaggctccagggaaggggctggagtggctttcttgcatcggtcgatatggtagtcccacatactacgcagactctgtgaaaggccgattcaccatctccagagacaatgccaagaacttattgtttttgcaaatgaatagcctgagagccgaggacacggctgtttattactgtgcaaagactcagtcctacaataactacgtaagtgactggggccagggaaccctggtcaccgtctcctcag

SEQ ID NO: 8967 - DNA, 379 bp, Homo sapiens
caggtgcagctggtggagtctgggggaggcgtggtccagcctggtaggtccctgagactctcctgtgcagcgtctggattcaccttcagtaactatggcatgcactgggtccgccaggctccaggcaaggggctggagtgggtggcagttatatggtatgatggaagtaataaatactatgcagactccgtgaagggccggttcaccatctccagagacaattccaagaacacgctgtctctgcaaatgaacagcctgagagccgaggacacggctgtatattactgtgcgagagatctagccactatagtgggagctaccacgaacgacgaccgatttgactactggggccagggaaccctggtcaccgtctcctcag

SEQ ID NO: 8968 - DNA, 361 bp, Homo sapiens
caggtgcagctgcaggagtcgggcccaggactggtgaagccttcacagaccctgtccctcacctgcactgtctctggtggctccatcagcagtggtggttactactggagctggatccgccagcacccagggaagggcctggagtggattgggtacatctattacagtgggagcacctactacaacccgtccctcaagagtcgagttaccatatcagtagacacgtctaagaaccagttctccctgaagctgagctctgtgactgccgcggacacggccgtgtattactgtgcgagagatctacgaccagctgctatactagactactggggccagggaaccctggtcaccgtctcctcag

SEQ ID NO: 8969 - DNA, 361 bp, Homo sapiens
caggtgcagctgcaggagtcgggcccaggactggtgaagccttcacagaccctgtccctcacttgcactgtctctggtggctccatcagcagtggtgctaattactggagctggatccgccagtacccagggaagggcctagaattcattggatacgtctattatactgggagcacctactacaacccgtccctcaggagtcgagtcaccatatcagtagacacgtctaagaaccagttctccctgaagctgacctctgtgactgccgcggacacggccgtatattactgtgcgagagtcagtggccacagcaactactttgactactggggccagggaaccctggtcaccgtctcctcag

SEQ ID NO: 8970 - DNA, 361 bp, Homo sapiens
caggtgcagctgcaggagtcgggcccaggactggtgaagccttcacagaccctgtccctcacctgcactgtctctggtggctccatcagcagtggtggttactactggagctggatccgccagcacccagggaagggcctggagtggattgggtacatctattacagtgggagcacctactacaacccgtccctcaagagtcgagttaccatatcagtagacacgtctaagaaccagttctccctgaagctgagctctgtgactgccgcggacacggccgtgtattactgtgcgagagaaggggcggcagctggcctttttgactactggggccagggaaccctggtcaccgtctcctcag

SEQ ID NO: 8971 - DNA, 364 bp, Homo sapiens
gaggtgcagctggtggagtccgggggaggcttggtccagccgggggggtccctcaaactctcctgtgtagcctctgggttcaccttcagtggctctgctatgcactgggtccgccaggcttccgggaaagggctggagtgggttggccgtattagaagcaacgctaacagttacgcgacaacatatgctgcgtcggtgaaaggcaggttcaccatctccagagatgattcaaagaacacggcgtatctgcaaatgaacagcctgaaaaccgaggacacggccgtgtattactgtactaccacgtataactggaactacgcatatggctactggggccagggaaccctggtcaccgtctcctcag

SEQ ID NO: 8972 - DNA, 357 bp, Homo sapiens
gaggtgcagctggtgcagtctggagcagaggtgaaaaagccgggggagtctctgaagatctcctgtaagggttctggatacagctttaccagctactggatcggctgggtgcgccagatgcccgggaaaggcctggagtggatggggatcatctatcctggtgactctgataccagatacagcccgtccttccaaggccaggtcaccatctcagccgacaagtccatcagcaccgcctacctgcagtggagcagcctgaaggcctcggacaccgccatgtattactgtgcgaggcgttcctactactactactacatggacgtctggggcaaagggaccacggtcaccgtctcctca

SEQ ID NO: 8973 - DNA, 358 bp, Homo sapiens
caggtgcagctggtggagtctgggggaggcgtggtccagcctgggaggtccctgagactctcctgtgcagcgtctggattcaccttcagtagctatggcatgcactgggtccgccaggctccaggcaaggggctggagtgggtggcagttatatggtatgatggaagtaataaatactatgcagactccgtgaagggccgattcaccatctccagagacaattccaagaacacgctgtatctgcaaatgaacagcctgagagccgaggacacggctgtgtattactgtgcgagagccttacgatttttggagtttatggacgtctggggcaaagggaccacggtcaccgtctcctcag

SEQ ID NO: 8974 - DNA, 360 bp, Homo sapiens
cagctgcagctgcaggagtcgggcccaggactggtgaagccttcggagaccctgtccctcacctgcactgtctctggtggctccatcagcagtagtagttactactggggctggatccgccagcccccagggaaggggctggagtggattgggagtatctattatagtgggagcacctactacaacccgtccctcaagagtcgagtcaccatatccgtagacacgtccaagaaccagttctccctgaagctgagctctgtgaccgccgcagacacggctgtgtattactgtgcgagacctctcggagcttaccactacatggacgtctggggcaaagggaccacggtcaccgtctcctca

SEQ ID NO: 8975 - DNA, 357 bp, Homo sapiens
gaggtgcagctgttggagtctgggggaggcttggtacagcctggggggtccctgagactctcctgtgcagcctctggattcacctttagcagctatgccatgagctgggtccgccaggctccagggaaggggctggagtgggtctcagctattagtggtagtggtggtagcacatactacgcagactccgtgaagggccggttcaccatctccagagacaattccaagaacacgctgtatctgcaaatgaacagcctgagagccgaggacacggccgtatattactgtgcgaaagagggctactactactactacatggacgtctggggcaaagggaccacggtcaccgtctcctca

SEQ ID NO: 8976 - DNA, 364 bp, Homo sapiens
gaggtgcagctggtggagtctgggggaggcttggtccagcctggagggtccctgagactctcctgtgcagcctctggattcaccttcagtgaccgctacatggactgggtccgccaggctccagggaaggggctggagtgggttggccgtactagaaacaaagctaacagttacagcacagaatacgccgcgtctgtgaaaggcagattcaccatctcaagagatgattcagagaactcagtatatctgcagatgaacagcctgaaaaccgaggacacggccgtgtatttctgtgctagagcccaatgggacctagggaccttcgatctctggggccgtggcaccctggtcactgtctcctcag

SEQ ID NO: 8977 - DNA, 370 bp, Homo sapiens
gaagtgcagctggtggagtctgggggaggcctggtcaagcctggggggtccctgagactctcctgtacaacctctggattcacctcaagattcaccttcagttcctataacttgaactgggtccgccaggctccagggaaggggctggagtgggtctcatccattactagtagtagtagttacacatactacgcagactcagtgaagggccgattcaccatctccagagacaacgccaagaaatcactgtatctgcaaatgaacagcctgagagccgaagacacggctatctattactgttcgggggcctaccagctgctatactggttcgacccctggggccagggaaccctggtcaccgtctcctcag

SEQ ID NO: 8978 - DNA, 358 bp, Homo sapiens
caggtgcagctggtgcagtctggggctgaggtgaagaagcctggggcctcagtgaaggtctcctgcaaggcttctggatacaccttcaccagttatgatatcaactgggtgcgacaggccactggacaagggcttgagtggatgggatggatgaaccctaacagtggtaacacaggctatgcacagaagttccagggcagagtcaccatgaccaggaacacctccataagcacagcctacatggagctgagcagcctgagatctgaggacacggccgtgtattactgtgcgagaggcctcgggtggttcggggagttatttccctggggccaagggacaatggtcaccgtctcttcag

SEQ ID NO: 8979 - DNA, 394 bp, Homo sapiens
gaggtgcagctggtggagtctgggggaggcctggtcaagcctggggggtccctgagactctcctgtgcagcctctggattcaccttcagtagttatagcatgaactgggtccgccaggctccagggaaggggctggagtgggtctcatccattactagaagtagtagttacatatactacgcagactcagtgaagggccgattcaccatctccagagacaacgccaagaactcactgtatctgcgaatgaacagcctgagagccgaggacacggctgtttattactgtgcgagagataaaacgctaccagctgctctgggcaaccaacctgaatttttccaccggcgctggttcgacccctggggccagggaaccctggtcaccgtctcctcag

SEQ ID NO: 8980 - DNA, 355 bp, Homo sapiens
caggtgcagctgcaggagtcgggcccaggccgggtgaagccttcggagaccctgtccctcacctgcactgtctctggtggctccatctctagtcactatttcaactggatccggcggcccccagggatggggctgcagtggattgggtacagccattacagtgggaatgccaaatacattccctccctcaagagtcgagtcgccatgtcagttgacacgtctacgagccagttctcactcaagctgaactctgtgaccgctgcggacacggccgtttattactgtgcgagatggtcggagaactttcgtgcttttgatatctggggccaggggacaatggtcaccgtctcttcag

SEQ ID NO: 8981 - DNA, 355 bp, Homo sapiens
caggagcggctgcaggagtcgggcccaggactggtgaagccttcggagaccctgtccctcacctgcactgtctctggtggctccatcagtagtcactattggaactggatccggcggcccccagggaagggactggagtggattgggtacagccatcacagtgggaggaccaagtacaatccctccctcaagagtcgagtcgccatgtcagtagacacgtccaagagtcaggtctcagtgaaggtgaactctgtgaccgctgcggacacggccgtttattactgtgcgagatggtcggaggaccttcgtgcttttgatatctggggccaggggacaatggtcaccgtctcttcag

SEQ ID NO: 8982 - DNA, 353 bp, Homo sapiens
gaggtgcagctggtggagtctgggggaggcctggtcaagccgggggggtccctgagactctcctgtgcagcctctggattcaccttcagtccctatagcatgaactgggtccgccaggctccagggaaggggctagagtgggtctcatttatgagtagaagtagtaattacatatactacgcagactcagtgaagggccggttcaccatctccagagacaacgccaagaactcactgtatctgcaaatgaacagcctgagagccgaggacacggctgtttattactgtgcgagaacgaatagcagctcggcccctagtgactactggggccagggaaccctggtcaccgtctc

SEQ ID NO: 8983 - DNA, 358 bp, Homo sapiens
gaggtgcagctggtggagtctgggggaggcctggtcaagcctggggggtccctgagactctcctgtgcagcctctggattcaccttcagtagctatagcatgaactgggtccgccaggctccagggaaggggctggagtgggtctcatccattagtagtagtagtagttacatatactacgcagactcagtgaagggccgattcaccatctccagagacaacgccaagaactcactgtatctgcaaatgaacagcctgagagccgaggacacggctgtgtattactgtgcgagagaatctaactggaactacgtggaggactactggggccagggaaccctggtcaccgtctcctcag

SEQ ID NO: 8984 - DNA, 390 bp, Homo sapiens
gaggtgcagctggtggagtctgggggaggcttggtccagcctggggggtccctgagactctcctgtgcagcctctggattcaccgtcagtagcaactacatgagctgggtccgccaggctccagggaaggggctggagtgggtctcagttatttatagcggtggtagcacatactacgcagactccgtgaagggcagattcaccatctccagagacaattccaagaacacgctgtatcttcaaatgaacagcctgagagccgaggacacggctgtgtattactgtgcgagtacatattgtagtggtggtagctgctatcgggatcggagctactactactactacggtatggacgtctggggccaagggaccacggtcaccgtctcctca

SEQ ID NO: 8985 - DNA, 393 bp, Homo sapiens
gaggtgcagctggtggagtctgggggaggcctggtcaagcctggggggtccctgagactctcctgtgcagcctctggattcaccttcagtagctatagcatgaactgggtccgccaggctccagggaaggggctggagtgggtctcatccattagtagtagtagtagttacatatactacgcagactcagtgaagggccgattcaccatctccagagacaacgccaagaactcactgtatctgcaaatgaacagcctgagagccgaggacacggctgtgtattactgtgcgagagaaaccgattacgatttttggagtggttattatacaatagattactactactacggtatggacgtctggggccaagggaccacggtcaccgtctcctca

SEQ ID NO: 8986 - DNA, 358 bp, Homo sapiens
cagctgcagctgcaggagtcgggcccaggactggtgaagccttcggagaccctgtccctcacctgcactgtctctggtggctccatcagcagtagtagttactactggggctggatccgccagcccccagggaaggggctggagtggattgggagtatctattatagtgggagcacctactacaacccgtccctcaagagtcgagtcaccatatccgtagacacgtccaagaaccagttctccctgaagctgagctctgtgaccgccgcagacacggctgtgtattactgtgcgagacacccatcggatagtagtctggactactggggccagggaaccctggtcaccgtctcctcag

SEQ ID NO: 8987 - DNA, 355 bp, Homo sapiens
gaggtgcagctggtggagtccgggggaggcttagttcagtctgggggggccctgagactctcctgtgcagcctctggattcaccttcactacctacgtgatgcactgggtccgccaagctccagggaaggggctggtgtgggtctcacgtattagtcatgatgggagtagtacaacctacgcggactccgtgaagggccgattcaccgtctccagagacaacgccaagaacacactgtatctgcaaatgaacggtctgagagccgaggacacggctatatattactgtacaagagatatcgactgggtcctctttgaccactggggccagggaacgctggtcaccgtctcttcag

SEQ ID NO: 8988 - DNA, 355 bp, Homo sapiens
gaggtgcagctggtggagtctgggggaggcttggtacagcctggggggtccctgagactctcctgtgcagcctctggattcaccttcggtccctttaccatgaactgggtccgccaggctccagggaaggggctggagtgggtttcatccattactagtggtagtggtaccttatactacgcagactctgtgaagggccgattcaccatctccagagacaatgccaagaactcactgtatctgcaaatgaacagcctgagagacgaggacacggctgtatattactgtgcgagagatcggaatggctattactttgactattggggccagggaaccctggtcaccgtctcctcag

SEQ ID NO: 8989 - DNA, 365 bp, Homo sapiens
caggtgcagctggtgtagtctggggctgaggtgaggacgcctggggcctcagtgaaggtctcttgcaaggcttctggatacaccttcaccgcctattatattcactgggtgcgacaggcccctggacaagggcttgagtggatgggatggatcaaccctaacagtggtggcacaaactatgcacagaaatttcagggcagggtcaccatgaccagggacacgtccaccagcacagcctacatggagatgcgtaggctgagatctgacgacacggccatatattactgtgcgagacagcaatattttgactgattattaaggacctgactactggggccagggaaccctggtcaccgtctcctcag

SEQ ID NO: 8990 - DNA, 358 bp, Homo sapiens
caggtgcagcttcaggagtcgggcccaggactggtgaagccttcacagaccctgtccctcacctgcactgtctctggtggctccatcagcagtgctgcttactactggagctggatccgccaacacccagggaagggcctggagtggattgggtacatctatcacaatgggaacacctactacaacccgtccttcaagagtcgagttaccatatcagtagacacgtctaagaaccagttctccctgaagctgaactctgtgactgccgcggacacggccgtgtatcactgtgcgagagggaatggttacggcaaacatgactactggggccagggaaccctggtcaccgtctcctcag

SEQ ID NO: 8991 - DNA, 354 bp, Homo sapiens
gaggtgcagctggtggagtctgggggaggcttggtacagcctggggggtccctgagactctcctgtgcggcctctggattcaccttcagtagctatagcatgaactgggtccgccaggctccagggaaggggctggagtgggtttcatacattagtagcagtagtagcaccatgtactacgcagactctgtgaagggccgattcaccatctccagagacaatgccaagaactcactgtatctgcaaatgaacagcctgagagacgaggacacggctgtgtattactgtgcgagggcccccccggcgagcggtatggacgtctggggccaagggaccacggtcaccgtctcctca

SEQ ID NO: 8992 - DNA, 355 bp, Homo sapiens
gaggtgcagctggtggagtctgggggaggcttggtccagcctggggggtccctgagactctcctgtgcagcctctggattcacctttagtcgctattggatgagctgggtccgccaggctccagggaaggggctggagtgggtggccaacataaagcaagatggaagtgagaaatactatgtggactctgtgaagggccgattcaccatctccagagacaacgccaagaactcactgtatctgcaaatgaacagcctgagagccgaggacacggctgtgtattattgtgcgagaggcacctggagtggctggccggactactggggccagggaaccctggtcaccgtctcctcag

SEQ ID NO: 8993 - DNA, 358 bp, Homo sapiens
caggtgcagctgcaggagtcgggcccaggactggtgaagccttcacagaccctgtccctcacctgcactgtctctggtggctccatcagcagtggtggttactactggagctggatccgccagcacccagggaagggcctggagtggattgggtacatctattacagtgggagcacctactacaacccgtccctcaagagtcgagttaccatatcagtagacacgtctaagaaccagttctccctgaagctgagctctgtgactgccgcggacacggccgtgtattactgtgcgagttgtggttattactgggcttttgatatctggggccaagggacaatggtcaccgtctcttcag

SEQ ID NO: 8994 - DNA, 351 bp, Homo sapiens
ttcagttgattcagtctggacctgaggcgaagaagccgggggcctcagtgagggtctcctgcacgacctccggttacaccttcacacacttctctatcaactgggtgcgacaggcccctggacaagggcttgagtggatgggattgatcagcggttataatggaaaaacaagttttgcccagagattccaagacagagtaaccatgaccagagacacatccacgagctctgtccacatggacctgaggagcctaacatccgacgacacggccgtctatttctgtgcgagaggtctccttcggggaatcacggaccactggggccagggaaccctcgtcaccgtctcctcag

SEQ ID NO: 8995 - DNA, 355 bp, Homo sapiens
caggttcagctggtacagtctggagctgaactgaagaagcctggggcctcagtgaaggtctcctgcaagacttctggttacacctttttcacctatactatcaactgggtgcgacagacccctggccaagggcttgagtggctgggttggatcagctcttacactggtaatgcaaactatgcacagagcctccagggcagactcaccctgaccccagactcatccacgagcacagcctacatggagctgaggggcctgacatctgacgacacggccatatattactgtgcaagacaactgggattgaactactttgactactggggccagggaaccctggtcaccgtctcttcag

SEQ ID NO: 8996 - DNA, 352 bp, Homo sapiens
gaggtgcagctggtggagtctgggggaggcttggtccagcctggggggtccctgagactctcctgtgcagcctctggattcagcgtcagtagcaactacatgagctgggtccgccaggctccagggaaggggctggagtgggtctcagttatttatagcggtggtagtacatactacacagactccgtgaagggcagattcaccatctccagagacaattccaagaacacgctgtatcttcaaatgaacagcctgagagccgaggacacggctgtgtattactgtgcgagcttaacctctaccggggggtttgactactggggccagggaaccctggtcaccgtctcctcag

SEQ ID NO: 8997 - DNA, 341 bp, Homo sapiens
gaggtgcagctggtggagtctgggggaggcttggtaaagcctggggggtcccttagactgtcctgtgcagcctctggattcactttcagtaacgcctggatgagctgggtccgccaggctccagggaaggggctggagtgggttggtcgcgttgtaggaaaactgatggtgggacaacacaatacgctgcacccgtgaaaggcagattcaccacgttgtatctgcaaatgaacagcctgaaaaccgaggacacagccgtgtattagtgtaccacagtggtatagaagcagctggtacggtcgactaccggggccagggaaccctggtcaccgtctcctcag

SEQ ID NO: 8998 - DNA, 388 bp, Homo sapiens
cagctgcagctgcaggagtcgggcccaggactggtgaagccttcggagaccctgtccctctcctgcactgtctctggtggctccatcagcagtactagttactactggggctggatccgccagcccccccgggaaggggctggagtggattgggagtatctattatagtgggagcacctactacaatccgtccctcaagagtcgagtcaccatatccgtagacacgtccaagaaccagttctccctgaagctgagctctgtgaccgccgcagacacggctgtgtattactgtgcgagacgggctacagtaactgccggcagcagctggtccaaagggggggggagattgactactggggccagggaaccctggtcaccgtctcctcag

SEQ ID NO: 8999 - DNA, 393 bp, Homo sapiens
cagctgcagctgcaggagtcgggcccaggactggtgaagccttcggagaccctgtctctcacctgcactgtctcgggtggctccatcagcagtagtaattactactggggctggatccgccagcccccagggaaggggctggagtggattgggagtgtccattatagcgggaacagttactacaatccggccctcaagagtcgagtcaccatatccgtagacacgtccaagaaccagttctccctgaagatgagctctatgaccgccgcagacacggctgtatattactgtgcgagtcagtattgtagtaattccaggtgctatacccggcataactattactactactacgtggccgtctggggcaaaggggccacggtcaccgtctcctca

SEQ ID NO: 9000 - DNA, 362 bp, Homo sapiens
gaggtgcagctggtggagtctgggggaggcttggtagagcctggggggtcccttagactctcctgtgtaggcactggattcactttcaataacgcctggatgagctgggtccgccaggctccagggaaggggctggagtgggtcggccgtattaaaagtaaaactgatggcgggacagcagagtacgctgcacccgtgaaaggcagattcaccatctcaagtgatgattcaaaagacacgctgtatctgcaaatgaacagcctgaaaaccgaagacacagccgtgtattactgtacaacctataacagtaactggtactacatggacgtctggggccaagggaccacggtcaccgtctcctc

SEQ ID NO: 9001 - DNA, 390 bp, Homo sapiens
caggttctgctggtgcagtctggagctgaggtgaagaagcctggggcctcagtgaaggtctcctgcaaggcttctggttacacctttaccagctttggtatcagctgggtgcgacaggcccctggacaagggcttgagtggatgggatggatcagcgcttacaatggtaacgcaaactatgcacagaagctgcagggcagagtcaccatgaccacagacacatccacgagcacagcctacatggagctgaggagcctgagatctgacgacacggccgtgtattactgtgcgagagattcgatactatggttcggggagttacgagttgagaactactaccactacggtatggacgtctggggccaagggaccacggtcaccgtctcctca

SEQ ID NO: 9002 - DNA, 215 bp, Homo sapiens
aaagctaacacttacgcgacagcatatggtgcgtcggtgaaaggcaggttcaccatctccagagatgattcagagaacacggcggagctgcaaatgaacagcctgaaaatcgaggacacggccgtgtatttctgatccaggggttacgatttttggagtagttacaatcccctttgaccactggggccagggaaccctggtcaccgtctcctcag

SEQ ID NO: 9003 - DNA, 390 bp, Homo sapiens
gaggtgcagctggtggagtctgggggaggcttggtccagcctggggggtccctgagactctcctgtgcagcctctggattcacctttagtagctattggatgagctgggtccgccaggctccagggaaggggctggagtgggtggccaacataaagcaagatggaagtgagaaatactatgtggactctgtgaagggccgattcaccatctccagagacaacgccaagaactcactgtatctgcaaatgaacagcctgagagccgaggacacggctgtgtattactgtgcgagagatgcggcgtattacgatttttggagtggttatcccggacactactactactacatggacgtctggggcaaagggaccacggtcaccgtctcctca

SEQ ID NO: 9004 - DNA, 318 bp, Homo sapiens
caggtgcagctgcaggagtcgggcccaggactggtgaagccttcatagaccctgtccctcacctgcactgtctctggtggcttcatcagcaggagcggattcttctggagctggatccgccagtacccggggaagggccaggagtggattgggcacatctattgcagcgggaacacgtactacaacccgtccctcaagagtcgacttagcaaatcagtggacacgtctaacaagcagctctccccgaaaatgaggtctgtgactgccgcggacacggccgacctccaccaagggcccatcggtcttccccctggcgcc

SEQ ID NO: 9005 - DNA, 358 bp, Homo sapiens
gaggtgcagctgttggagtctgggggaggcttggtacagcctggggggtccctgagactctcctgtgcagcctctggattcacctttagcagctatgccatgagctgggtccgccaggctccagggaaggggctggagtgggtctcagctattagtggtagtggtggtagcacatactacgcagactccgtgaagggccggttcaccatctccagagacaattccaagaacacgctgtatctgcaaatgaacagcctgagagccgaggacacggccgtatattactgtgcgaaagataattcaatgtggtggcaaaccccactctggggccagggaaccctggtcaccgtctcctcag

SEQ ID NO: 9006 - DNA, 356 bp, Homo sapiens
gaggtgcagctgttggagtctgggggaggcttggtacagcctggggggtccctgagactctcctgtgcagcctctggattcacctttaacagctatgacatgagctgggtccgccaggctccagggaaggggctggagtgggtctcatttattagtggtagtggtagtaccacatactacgcagactccgtgaagggccgattcaccatctccagagacaattccaagaacacgctgtatctgcaaatgaacagcctgagagacgatgacacggccgtatatcactgtgcgagaacaaggtgggccgcctactactttgactactggggccagggaaccctggtcaccgtctcctc

SEQ ID NO: 9007 - DNA, 343 bp, Homo sapiens
gaggtgcagttggtggagtctgggggaggcttggcccagccgggggggtccctgagactctcctgtgcagcctctggattcacctttagtagtatttggatgagttgggtccgccaggctccagggaaggggccggagtgggtggcctacataaagggagatggaactgagaaatactatttggactctgtgaagggccgattcaccatctccagagacaacgccaagagttctctgtatctgcaaatgaacagcctgagagccgaggacacggctatgtattactgtgcgacagattggggttactcctggggccagggaaccctggtcaccgtctcctcag

SEQ ID NO: 9008 - DNA, 325 bp, Homo sapiens
gaaattgtgttgacgcagtctccagacaccctgtctttgtctccaggggaaagagccaccctctcctgcagggccagtcagaattttggcagcagctacttagcctggtaccagcagaaacctggccaggctcccaggctcctcgtgtatggtgcatccagcagggccattggcatcccagacaggttcagtggcagtgggtctgggacagacttcactctcaccatcagcagactggaacctgaagattttgcagtgtattactgtcagcagtatggaagctcacctgtcactttcggcggagggaccaaggtggagatcaaac

SEQ ID NO: 9009 - DNA, 325 bp, Homo sapiens
gaaattgtgttgacgcagtctccagacaccctgtctttgtctccaggggaaagagccaccctctcctgcagggccagtcagaattttggcagcagctacttagcctggtaccagcagaaacctggccaggctcccaggctcctcatgtatggtgcatccagcagggccattggcatcccagacaggttcagtggcagtgggtctgggacagacttcactctcaccatcagcagactggaacctgaagattttgcagtgtattactgtcagcactatggaagctcacctgtcactttcggcggagggaccaaggtggagatcaaac

SEQ ID NO: 9010 - DNA, 325 bp, Homo sapiens; identical to SEQ ID NO: 9008

SEQ ID NO: 9011 - DNA, 325 bp, Homo sapiens
gaaattgtgttgacacagtctccagcccccgtgtctttgtctccaggggaaagagccaccctctcctgcagggccagtcagagtgttagcacttacttagcctggtacctacacaaacctggccaggctcccaggctcctcatctatgatgcatccaacagggccactggcatcccagccaggttcagtggcagtgggtctgggacagacttcactctaaccatcagcagcctagagcctgaagattttgcagtttattactgtcagcagtataatacctggcctccgtacacttttggccaggggaccaagctggagatcaaac

SEQ ID NO: 9012 - DNA, 325 bp, Homo sapiens; identical to SEQ ID NO: 9008

SEQ ID NO: 9013 - DNA, 325 bp, Homo sapiens; identical to SEQ ID NO: 9008

SEQ ID NO: 9014 - DNA, 325 bp, Homo sapiens; identical to SEQ ID NO: 9008

SEQ ID NO: 9015 - DNA, 325 bp, Homo sapiens; identical to SEQ ID NO: 9008

SEQ ID NO: 9016 - DNA, 325 bp, Homo sapiens; identical to SEQ ID NO: 9008

SEQ ID NO: 9017 - DNA, 325 bp, Homo sapiens; identical to SEQ ID NO: 9008

SEQ ID NO: 9018 - DNA, 325 bp, Homo sapiens; identical to SEQ ID NO: 9008

SEQ ID NO: 9019 - DNA, 325 bp, Homo sapiens; identical to SEQ ID NO: 9008

SEQ ID NO: 9020 - DNA, 325 bp, Homo sapiens; identical to SEQ ID NO: 9008

SEQ ID NO: 9021 - DNA, 325 bp, Homo sapiens; identical to SEQ ID NO: 9008

SEQ ID NO: 9022 - DNA, 318 bp, Homo sapiens
gaaattgtgttgacacagtctccagcccccgtgtctttgtctccaggggaaagagccaccctctcctgcagggccagtcagagtgttagcacttacttagcctggtacctacacaaacctggccaggctcccaggctcctcatctatgatgcatccaacagggccactggcatcccagccaggttcagtggcagtgggtctgggacagacttcactctaaccatcagcagcctagagcctgaagattttgcagtttattactgtcaccagcgtaacaactgatcaccttcggccaagggacacgactggagattaaac

SEQ ID NO: 9023 - DNA, 318 bp, Homo sapiens; identical to SEQ ID NO: 9022

SEQ ID NO: 9024 - DNA, 325 bp, Homo sapiens; identical to SEQ ID NO: 9008

SEQ ID NO: 9025 - DNA, 325 bp, Homo sapiens; identical to SEQ ID NO: 9008

SEQ ID NO: 9026 - DNA, 325 bp, Homo sapiens; identical to SEQ ID NO: 9009

SEQ ID NO: 9027 - DNA, 325 bp, Homo sapiens; identical to SEQ ID NO: 9008

SEQ ID NO: 9028 - DNA, 325 bp, Homo sapiens; identical to SEQ ID NO: 9009

SEQ ID NO: 9029 - DNA, 325 bp, Homo sapiens; identical to SEQ ID NO: 9008

SEQ ID NO: 9030 - DNA, 325 bp, Homo sapiens; identical to SEQ ID NO: 9008

SEQ ID NO: 9031 - DNA, 325 bp, Homo sapiens; identical to SEQ ID NO: 9008

SEQ ID NO: 9032 - DNA, 325 bp, Homo sapiens; identical to SEQ ID NO: 9009

SEQ ID NO: 9033 - DNA, 325 bp, Homo sapiens; identical to SEQ ID NO: 9008

SEQ ID NO: 9034 - DNA, 325 bp, Homo sapiens; identical to SEQ ID NO: 9008

SEQ ID NO: 9035 - DNA, 325 bp, Homo sapiens; identical to SEQ ID NO: 9008

SEQ ID NO: 9036 - DNA, 325 bp, Homo sapiens; identical to SEQ ID NO: 9008

SEQ ID NO: 9037 - DNA, 325 bp, Homo sapiens; identical to SEQ ID NO: 9008

SEQ ID NO: 9038 - DNA, 325 bp, Homo sapiens; identical to SEQ ID NO: 9008

SEQ ID NO: 9039 - DNA, 325 bp, Homo sapiens; identical to SEQ ID NO: 9008

SEQ ID NO: 9040 - DNA, 325 bp, Homo sapiens; identical to SEQ ID NO: 9009

SEQ ID NO: 9041 - DNA, 325 bp, Homo sapiens; identical to SEQ ID NO: 9008

SEQ ID NO: 9042 - DNA, 325 bp, Homo sapiens; identical to SEQ ID NO: 9008

SEQ ID NO: 9043 - DNA, 318 bp, Homo sapiens; identical to SEQ ID NO: 9022

SEQ ID NO: 9044 - DNA, 318 bp, Homo sapiens; identical to SEQ ID NO: 9022

SEQ ID NO: 9045 - DNA, 325 bp, Homo sapiens; identical to SEQ ID NO: 9008

SEQ ID NO: 9046 - DNA, 325 bp, Homo sapiens; identical to SEQ ID NO: 9008

SEQ ID NO: 9047 - DNA, 318 bp, Homo sapiens; identical to SEQ ID NO: 9022

SEQ ID NO: 9048 - DNA, 318 bp, Homo sapiens; identical to SEQ ID NO: 9022

SEQ ID NO: 9049 - DNA, 325 bp, Homo sapiens; identical to SEQ ID NO: 9008

SEQ ID NO: 9050 - DNA, 325 bp, Homo sapiens; identical to SEQ ID NO: 9008

SEQ ID NO: 9051 - DNA, 325 bp, Homo sapiens; identical to SEQ ID NO: 9008

SEQ ID NO: 9052 - DNA, 325 bp, Homo sapiens; identical to SEQ ID NO: 9008

SEQ ID NO: 9053 - DNA, 322 bp, Homo sapiens
gaaattgtgttgacacagtctccagcccccgtgtctttgtctccaggggaaagagccaccctctcctgcagggccagtcagagtgttagcacttacttagcctggtacctacacaaacctggccaggctcccaggctcctcatctatgatgcatccaacagggccactggcatcccagccaggttcagtggcagtgggtctgggacagacttcactctcaccatcagcagactggaacctgaagattttgcagtgtattactgtcagcagtatggaagctcacctgtcactttcggcggagggaccaaggtggagatcaaac

SEQ ID NO: 9054 - DNA, 325 bp, Homo sapiens; identical to SEQ ID NO: 9008

SEQ ID NO: 9055 - DNA, 325 bp, Homo sapiens; identical to SEQ ID NO: 9009

SEQ ID NO: 9056 - DNA, 325 bp, Homo sapiens; identical to SEQ ID NO: 9008

SEQ ID NO: 9057 - DNA, 331 bp, Homo sapiens
cagtctgccctgactcagcctgcctccgtgtctgggtttcctggacagtcgatcaccatctcctgcactggaaccagcagtgacgttggtggttatgactacgtctcctggttccaacaacacccaggcaaagtccccaaactcataatttttgatatcagtaatcggccctcagggatttctgatcgcttctctggctccaagtctggcaacacggcctccctgaccatctctgggctccaggctgaggacgaggctgattattactgcagctcatatacaagcatcagcactcaggtattcggcggggggaccaagctgaccgtcctag

SEQ ID NO: 9058 - DNA, 331 bp, Homo sapiens
cagtctgccctgactcagcctgcctccgtgtctgggtttcctggacagtcgatcaccatctcctgcactggaaccagcagtgacgttggtggttatgactacgtctcctggtaccaacaacacccaggcaaagtccccaaactcataatttatgatattagtaatcggccctcagggatttctgatcgcttctctggctccaagtctggcaacacggcctccctgaccatctctgggctccaggctgaggacgaggctgattattactgcagctcatatacaagcatcagcactcaggtattcggcggggggaccaagctgaccgtcctag

SEQ ID NO: 9059 - DNA, 331 bp, Homo sapiens
cagtctgccctgactcagcctgcctccgtgtctgggtttcctggacagtcgatcaccatctcctgcactggaaccagcagtgacgttggtggttatgactacgtctcctggtaccaacaacacccaggcaaagtccccaaactcataatttatgatatcaataatcggccctcagggatttctgatcgcttctctggctccaagtctggcaacacggcctccctgaccatctctgggctccaggctgaggacgaggctgattattactgcagctcatatacaagtttcagcactcaggtattcggcggggggaccaaactgaccgtcctag

SEQ ID NO: 9060 - DNA, 331 bp, Homo sapiens
cagtctgccctgactcagcctgcctccgtgtctgggtttcctggacagtcgatcaccatctcctgcactggaaccagcagtgacgttggtggttatgactacgtctcctggtaccaacaacacccaggcaaagtccccaaactcataatttatgatatcagtaatcggccctcagggatttctgatcgcttctctggctccaagtctggcaacacggcctccctgaccatctctgggctccaggctgaggacgaggctgattattactgcagctcatatacaagcatcagcactcaggtattcggcggggggaccaagctgaccgtcctag

SEQ ID NO: 9061 - DNA, 331 bp, Homo sapiens; identical to SEQ ID NO: 9060

SEQ ID NO: 9062 - DNA, 331 bp, Homo sapiens
cagtctgccctgactcagcctgcctccgtgtctgggtttcctggacagtcgatcaccatctcctgcactggaaccagcagtgacgttggtggttatgactacgtctcctggtaccaacaacacccaggcaaagtccccaaactcataatttatgatatcagtaatcggccctcagggatttctgatcgcttctctggctccaagtctggcaacacggcctccctgaccatctctgggctccaggctgaggacgaggctggttattactgcagctcatatacaagcgtcagcactcaggtattcggcggggggaccaagctgaccgtcctag

SEQ ID NO: 9063 - DNA, 331 bp, Homo sapiens
cagtctgccctgactcagcctgcctccgtgtctgggtttcctggacagtcgatcaccatctcctgcactggaaccagcagtgacgttggtgcttatgactacgtctcctggtaccaacagcacccaggcaaagtccccaaactcataatttatgatatcaataatcggccctcagggatttctgatcgcttctctggctccaagtctggcaacacggcctccctgaccgtctctgggctccaggctgaggacgagggtgattattactgcagctcatatacaagcatcagtactcaggtattcggcggggggaccaaggtgaccgtcctag

SEQ ID NO: 9064 - DNA, 331 bp, Homo sapiens; identical to SEQ ID NO: 9060

SEQ ID NO: 9065 - DNA, 331 bp, Homo sapiens; identical to SEQ ID NO: 9060

SEQ ID NO: 9066 - DNA, 331 bp, Homo sapiens
cagtctgccctgactcagcctgcctccgtgtctgggtttcctggacagtcgatcaccatctcctgcactggaaccagcagtgacgttggtggttatgactacgtctcctggtaccaacaacacccaggcaaagtccccaaactcataatttatgatatcagtaatcggccctcagggatttctgatcgcttctctggctccaagtctggcaacacggcctccctgaccatctctgggctccaggctgaggacgaggctgattattactgcagctcatatacaagcatcagcactcaggtattcggcggggggaccaacctgaccgtcctag

SEQ ID NO: 9067 - DNA, 331 bp, Homo sapiens; identical to SEQ ID NO: 9060

SEQ ID NO: 9068 - DNA, 331 bp, Homo sapiens; identical to SEQ ID NO: 9060

SEQ ID NO: 9069 - DNA, 331 bp, Homo sapiens; identical to SEQ ID NO: 9060

SEQ ID NO: 9070 - DNA, 331 bp, Homo sapiens; identical to SEQ ID NO: 9060

SEQ ID NO: 9071 - DNA, 331 bp, Homo sapiens; identical to SEQ ID NO: 9060

SEQ ID NO: 9072 - DNA, 331 bp, Homo sapiens
cagtctgccctgactcagcctgcctccgtgtctgggtttcctggacagtcgatcaccatctcctgcactggaaccagcaatgacgttggtgcttatgactacgtctcttggtatcaacaacacccaggcaaagtccccaaactcatcatttatgatgtcagtaatcggccctcagggatttctgatcgcttctctggctccaagtctgacaacacggcctccctgatcatctctgggctccaggctgaggacgaggctgattattactgcagctcatatacaaccatcaaaactcaggtcttcggcggggggaccaagctgaccgtcctag

SEQ ID NO: 9073 - DNA, 331 bp, Homo sapiens; identical to SEQ ID NO: 9060

SEQ ID NO: 9074 - DNA, 331 bp, Homo sapiens
cagtctgccctgactcagcctgcctccgtgtctgggtttcctggacagtcgatcaccatctcctgcactggaaccagcagtgacgttggtggttatgactacgtctcctggtaccaacaacatccaggcaaagtccccaaactcataatttatgatatcagtaatcggccctcagggatttctgatcgcttctctggctccaagtctggcaacacggcctccctgaccatctctgggctccaggctgaggacgaggctgattattactgcagctcatatacaagcatcagcactcaggtattcggcggggggaccaacctgaccgtcctag

SEQ ID NO: 9075 - DNA, 331 bp, Homo sapiens; identical to SEQ ID NO: 9060

SEQ ID NO: 9076 - DNA, 331 bp, Homo sapiens
cagtctgccctgactcagcctgcctccgtgtctgggtttcctggacagtcgatcaccatctcctgcactggaaccagcagtgacgttggtggttatgactacgtctcctggtaccaacaacacccaggcaaagtccccaaactcataatttatgatatcagtaatcggccctcagggatttctgatcgcttctctggctccaagtctggcaacacggcctccctgaccatctctgggctccaggctgaggacgaggctgattattactgcagctcatatacaagcatcaggactcaggtattcggcggggggaccaagctgaccgtcctag

SEQ ID NO: 9077 - DNA, 331 bp, Homo sapiens
cagtctgccctgactcagcctgcctccgtgtctgggtttcctggacagtcgatcaccatctcctgcactggaaccagcagtgacgttggtggttatgactacgtctcctggtaccaacaacacccaggcaaagtccccaaactcataatttatgatatcactgagcggccctcagggatttctgatcgcttctctggctccaagtctggcaacacggcctccctgaccatctctgggctccaggctgaggacgaggctgattattactgcagctcatatacaagcatcaaaactcaggtattcggcggggggaccaagctgaccgtcctag

SEQ ID NO: 9078 - DNA, 331 bp, Homo sapiens
cagtctgccctgactcagcctgcctccgtgtctgggtttcctggacagtcgatcaccatctcctgcgctggaaccaccagtgacgttggtggttttgactacgtctcctggtaccaacaacacccaggcaaagtccccaaactcataatttatggtatcactgatcggccctcagggatttctgatcgcttctctggctccaagtctggcaacacggcctccctgaccatctccggtctccaggctgaggacgaggctgattattactgcagctcatatacaagcatcagcactcacgtattcggcggggggaccaagctgaccgtcctag

SEQ ID NO: 9079 - DNA, 331 bp, Homo sapiens
cagtctgccctgactcagcctgcctccgtgtctgggtctcctggacagtcgatcaccatctcctgcactggaaccagcagtgacgttggtggttatgactatgtctcctggtaccagcaacacccaggcaaagcccccaaactcatgatttatgatgtcagtaatcggccctcagggatttctaatcgcttctctggctccaagtctggcaacacggcctccctgaccatctctgggctccaggctgaggacgaggctgattattactgcagctcatatacaagcatctccactcacgtattcggcggagggaccaagctgaccgtcctag

SEQ ID NO: 9080 - DNA, 331 bp, Homo sapiens
cagtctgccctgactcagcctgcctccgtgtctgggtttcctggacagtcgatcaccatctcctgcactggaaccagcagtgacgttggtggttatgactacgtctcctggtaccaacaacacccaggcaaagtccccaaactcataatttatgatatcagtaatcggccctcagggatttctgatcgcttctctggctccaagtctggcaacacggcctccctgaccatctctgggctccaggctgaggacgaggctgattattactgcagctcatatacaagcatcagcactcagttattcggcggggggaccagcctgaccgtcctag

SEQ ID NO: 9081 - DNA, 331 bp, Homo sapiens
cagtctgccctgactcagcctgcctccgtatctgcgtttcctggacagtcgatcaccatctcctgcactggaaccagcagtgacgttggtggttatgactacgtctcctggtaccaacaacacccaggcacaatccccaaactcataatttatgatatcagtaatcggccctcagggatttctggtcgcttctctggctccaagtctggcaacacggcctccctgaccatctctgggctccaggctgaggacgaggctgattattactgcagctcatatgcaaccatcaggactcaggtcttcggcggggggaccaaggtgaccgtcctag

SEQ ID NO: 9082 - DNA, 331 bp, Homo sapiens
cagtctgccctgactcagcctgcctccgtgtctgggtctcctggacagtcgatcaccatgtcctgcactggaaccagcagtgacgttggtggttatgactatgtctcctggtaccaacagcacccaggcaaagcccccaaactcatgatttatgatgtcagtaatcggccctcaggggtttctaatcggttctctggctccaagtctggcaacacggcctccctgaccatctctgggctccaggctgaggacgaggctgattattactgcagctcatatacaagcagcagcactcaggtattcggcggagggaccaagctgaccgtcctag

SEQ ID NO: 9083 - DNA, 331 bp, Homo sapiens; identical to SEQ ID NO: 9082

SEQ ID NO: 9084 - DNA, 320 bp, Homo sapiens
gacatccagatgacccagtctccatcctccctgtctgcatctataggagacagagtcaccatcacttgccaggcgagtcaggacattagcaactctttaaattggtatcagcaggagccagggaaagcccctaacctcctgatctacgatgcatccaatttggaaacaggggtcccatcaaggttcagtggaagtggatctgggacagattttactttcaccatcagcagcctgcagcctgaagatattgcaacatattactgtcaacagtatcataatctccctcgcacttttggccaggggaccaagctggagatcaa

SEQ ID NO: 9085 - DNA, 320 bp, Homo sapiens
gacatccagatgacccagtctccatcctccctgtctgcatctataggagacagagtcaccatcacttgccaggcgagtcaggacattagcaactctttacaatggtatcagcaggagccagggaaagcccctaagctcctgatctacgatgcatccaatttggaaacaggggtcccatcaaggttcagtggaagtggatctgggacagattttactttcaccatcagcagcctgcagcctgaagatattgcaacatattactgtcaacactatcataatctccctcgcacttttggccaggggaccaagctggagatcaa

SEQ ID NO: 9086 - DNA, 320 bp, Homo sapiens
gacatccagatgacccagtctccatcctccctgtctgcatctataggagacagagtcaccatcacttgccaggcgagtcaggacattaccaactctttacaatggtatcagcaggagccagggaaagcccctaagctcctgatctacgatgcatccaaattggaaacaggggtcccatcaaggttcagtggaagtggatctgggacagattttactttcaccatcagcagcctgcaggctggagatattgcaacatattactgtcaacactatcataatctccctcgcacttttggccaggggaccaagctggagatcaa

SEQ ID NO: 9087 - DNA, 318 bp, Homo sapiens
catccagatgacccagtctccatcctccctgtctgcatctataggagacagagtcaccatcacttgccaggcgagtcaggacattagcaactctttacaatggtatcagcaggagccagggaaagcccctaaactcctgatctacgatgcatccaatttggaaacaggggtcccatcaaggttcagtggaagtggatctgggacagattttactttcaccatcagcagcctgcagcctgaagatattgcaacatattactgtcaacactatcatattctccctcgcacttttggccaggggaccaagctggagatcaa

SEQ ID NO: 9088 - DNA, 320 bp, Homo sapiens
gacatccagatgacccagtctccatcctccctgtctgcatctataggagacagagtcaccatcacttgccaggcgagtcaggacattaccaagtctttaaattggtatcggcaggagccagggaaagcccctaacctcctgatctacgatgcatccaatttggaaacaggggtcccatcaaggttcagtggaagtggatctgggacagattttactttcaccatcagcagcctgcagcctgaagatattgcaacatattactgtcaacagtatcataatctccctcgcacttttggccaggggaccaagctggagatcaa

SEQ ID NO: 9089 - DNA, 320 bp, Homo sapiens; identical to SEQ ID NO: 9086

SEQ ID NO: 9090 - DNA, 320 bp, Homo sapiens
gacatccagatgacccagtctccatcctccctgtctgcatctataggagacagagtcaccatcacttgccaggcgagtcaggacattaccaactctttaaattggtatcggcaggagccagggaaagcccctaacctcctgatctacgatgcatccattttggaaacaggggtcccatcaaggttcagtggaagtggatctgggacacattttactttcaccatcagcagcctgcagcctgaagatattgcaacatattactgtcaacagtatcataatctccctcgcacttttggccaggggaccaagctggagatcaa

SEQ ID NO: 9091 - DNA, 320 bp, Homo sapiens; identical to SEQ ID NO: 9086

SEQ ID NO: 9092 - DNA, 320 bp, Homo sapiens; identical to SEQ ID NO: 9084

SEQ ID NO: 9093 - DNA, 320 bp, Homo sapiens; identical to SEQ ID NO: 9086

SEQ ID NO: 9094 - DNA, 319 bp, Homo sapiens
gacatccagatgacccagtctccatcctccctgtctgcatctataggagacagaatcaccgtcacttgccaggcgagtcaggacattaccaagtctataaattggtatcggcaggagccaggaaaagcccctgacctcctgatctacgatgcatccattttgggaacaggggtctcatcaaggttcagtgggagtggatctgggacagattttactttcaccatcagcagcctgcagcctgaagatactggaacatattactgtcaacagtatcataatctccctcgcacttttggccaggggaccaagctggagatca

SEQ ID NO: 9095 - DNA, 319 bp, Homo sapiens
gacatccagatgacccagtctccatcctccctgtctgcatctataggagacagagtcaccatcacttgccaggcgagtcaggacattagcagctctttaaattggtatcggcaggagccagggaaagcccctaacctcctgatctacgatgcatccaatttggaaacaggggtcccatcaaggttcagtggaagtggatctgggacacattttactttcaccatcagcagcctgcagcctgaagatgttgcaacatattactgtcaacactatcataatctccctcgcacttttggccaggggaccaagctggagatca

SEQ ID NO: 9096 - DNA, 320 bp, Homo sapiens; identical to SEQ ID NO: 9086

SEQ ID NO: 9097 - DNA, 320 bp, Homo sapiens
gacatccagatgacccagtctccatcctccctgtctgcatctataggagacagagtcaccatcacttgccaggcgagtcaggacattaccaactctttaaattggtatcggcaggagccagggaaagcccctaacctcctaatctacgatgcatccattttggaaacaggggtcccatcaaggttcagtggaagtggatctgggacacattttactttcaccatcagcagcctgcagcctgaagatattgcaacatattactgtcaacagtatcataatctccctcgcacttttggccaggggaccaagctggagatcaa

SEQ ID NO: 9098 - DNA, 319 bp, Homo sapiens
tcctatgacctggctcagccactgtcagtgtcagtggccctgggacagacggccaagattatctgtgggggaaccaacattggaagtaaacatgtgcactggtaccagcaaaagccaggccaggcccctgtgctggtcatctatagggataataatcggccctctgggatccctgagcgattctctggctccaactcggggaacacggccaccctgaccatcagcagagcccaagccggggatgaggctgactattattgtcaggtgtgggacagcagcgctgtagtatttggcggtgggaccaagctgaccgtcttag

SEQ ID NO: 9099 - DNA, 319 bp, Homo sapiens
tcctatgacctggctcagccactgtcagtgtcagtggccctgggacagacggccaagattatctgtgggggaaccaacattggaagtaaacatgtgcactggtaccagcaaaagccaggccaggcccctgtgctagtcatctatagggataataatcggccctctgggatccctgagcgattctctggctccaactcggggaacacggccaccctgaccatcagtagagcccaagccggggatgaggctgactattattgtcaggtgtgggacagcagcgctgtagtgtttggcggtgggaccaagctgaccgtcttag

SEQ ID NO: 9100 - DNA, 319 bp, Homo sapiens; identical to SEQ ID NO: 9099

SEQ ID NO: 9101 - DNA, 319 bp, Homo sapiens; identical to SEQ ID NO: 9099

SEQ ID NO: 9102 - DNA, 319 bp, Homo sapiens; identical to SEQ ID NO: 9099

SEQ ID NO: 9103 - DNA, 319 bp, Homo sapiens
tcctatgacctgactcagccactttcagtgtcagtggccctgggacagacggccaggattatctgtgggggaaccaacattggaagtaaacatgtgcactggtaccagcagaagccaggccaggcccctatcctggtcatctatagggataataaccggccctctgggatccctgagcgattctctggctccaactcggggaacacggccaccctgaccatcagcagagcccaagccggggatgaggctgactattattgtcaggtgtgggacagcagcgctgtagtatttggcggtgggaccaagctgaccgtcttag

SEQ ID NO: 9104 - DNA, 319 bp, Homo sapiens; identical to SEQ ID NO: 9103

SEQ ID NO: 9105 - DNA, 319 bp, Homo sapiens
tcctatgacctgactcagccactttcagtgtcagtggccctgggacagacggccaggattatctgtgggggaaccaacattggaagtaaacatgtgcactggtaccagcagaagccaggccaggcccctatcctggtcatttatagggataataaccggccctctgggatccctgagcgattctctggctccaactcggggaacacggccaccctgaccatcagcagagcccaagccggggatgaggctgactattattgtcaggtgtgggacagcagcgctgtagtatttggcggtgggaccaagctgaccgtcttag

SEQ ID NO: 9106 - DNA, 319 bp, Homo sapiens; identical to SEQ ID NO: 9103

SEQ ID NO: 9107 - DNA, 319 bp, Homo sapiens
tcctatgacctggctcagccactgtcagtgtcagtggccctgggagagacggccaggataatctgtgggggaaccaacattggaagtaaacatgtgcactggtaccaacaaaagccaggccaggcccctgtgctggtcatctatagggataataatcggccctctgggatccctgaacgattctctggctccaactcggggaacacggccaccctgaccatcagcagcgcccaagccggggatgaggctgactattattgtcaggtgtgggacagcagcgctgtagtatttggcagtgggaccaagctgaccgtcttag

SEQ ID NO: 9108 - DNA, 319 bp, Homo sapiens
tcctatgacctgactcagccactttcagtgtcagtggccctgggacagacggccaggattatctgtgggggaaccaacattggaagtaaacatgtgcactggtaccagcagaagccaggccaggcccctgtgctggtcatctatagggataataaccggccctctgggatccctgagcgattctctggctccaactcggggaacacggccaccctgaccatcagcagagcccaagccggggatgaggctgactattattgtcaggtgtgggacagcagcgctgtagtatttggcggtgggaccaagctgaccgtcttag

SEQ ID NO: 9109 - DNA, 319 bp, Homo sapiens
tcctatgacctgactcagccactttcagtgtcagtggccctgggacagacggccaggattatctgtgggggaaccaacattggaagtaaacatgtgcactggtaccagcagaagccaggccaggcccctgtgctggtcatctatagggataataaccggccctctgggatccctgagcgattctctggctccaactcggggaacacggccaccctgaccatcagcagagcccaagccggggatgaggctgactattattgtcaggtgtgggacagcagcgctgtactatttggcggtgggaccaagctgaccgtcttag

SEQ ID NO: 9110 - DNA, 319 bp, Homo sapiens
tcctatgacctgactcagccactttcagtgtcagtggccctgggacagacggccaggattatctgtgggggaagcaacattggaagtaaacatgtgcactggtaccagcagaaggcaggccaggcccctgtgctggtcatctatagggataataaccggccctctgggatccctgagcgattctctggctccaactcggggaacacggccaccctgaccatcagcagagcccaagccggggatgaggctgactattattgtcaggtgtgggacagcagcgctgtagtatttggcggtgggaccaagttgaccgtcttag

SEQ ID NO: 9111 - DNA, 331 bp, Homo sapiens
cagtctgtgttgacgcagccgccctcagtgtctgcggccccaggacagaaggtcaccatctcctgctctggaagcagctccaatattgcaaacagttatatatcttggtaccagcaactcccaggaacagcccccaaactcctcatctatgaaaataataagcgaccctcagggattcctgaccgattctccggctccaagtctggcacgtcagccaccctgggcatcaccggactccagactggggacgaggccgaatattactgcggaacatgggatagcagcctgaatactgggatattcggcggagggacccagctgaccgtcctag

SEQ ID NO: 9112 - DNA, 331 bp, Homo sapiens
cagtctcttttgacgcagccgccctcagtgtctgcggccccaggacagaaggtcaccatctcctgctctggaaacaacttcaacattgagaataattatgtatcctggtaccagcagctcccaggaacagcccccaaactcctcatctctgaaaataataagcgaccctcagggattcctgaccgattctctggctccaagtctggcacgtcagccaccctgggcatcaccggactccagactggggacgaggccgattattattgcggaacatgggatagcagcctgaatactggggtattcggcggtgggaccaagctgaccgtcctag

SEQ ID NO: 9113 - DNA, 331 bp, Homo sapiens
cagcctgtgttgacgcagccgccctcagtgtcagcggccccaggacagaaggtcaccatctcctgctctggaagcaacttcaacattgagaataattatgtatcctggtaccagcagctcccagggacagcccccaaactcctcatctctgaaaatgataagcgaccctcagggattcctgaccgattctctggctccaagtctggcacgtcagccaccctgggcatcaccggactgcagactggggacgaggccgattattactgcggaacatgggatagcagcctgaatactggggtattcggcggagggaccaagctgaccgtcctag

SEQ ID NO: 9114 - DNA, 331 bp, Homo sapiens
cagtctgtgttgacgcagccgccctcagtgtctgcggccccaggacagaaggtcaccatctcctgctctggaagcagctccaacattgagaataattatgtatcctggtatcagcagctcccaggaacaccccccaaactcctcatctatgaaaataataagcgaccctcagggattcctgaccgattctctggctccaagtctggcacgtcagccaccctgggcatcaccggactccagactggggacgaggccgattattactgcggaacatgggatagcagcctgagtactgggttattcggcggagggaccaagctgaccgtcctag

SEQ ID NO: 9115 - DNA, 331 bp, Homo sapiens
cagtctgtgttgacgcagccgccctcagtgtctgcggccccaggacagaaggtcaccatctcctgctctggaagcagctccaacattgagaataattatgtatcctggtaccagcagctcccaggaacaccccccaaactcctcatctatgaaaataataagcgaccctcagggattcctgaccgattctctggctccaagtctggcacgtcagccaccctgggcatcaccggactccagactggggacgaggccgattattactgcggaacatgggatagcagcctgagtactgggttattcggcggagggaccaagctgaccgtcctag

SEQ ID NO: 9116 - DNA, 331 bp, Homo sapiens
cagtctgtgttgacgcagccgccctcagtgtctgcggccccaggacagagggtcaccatctcctgctctggaagcagctccaacattgagaatatttatgtatcctggtaccagcacctcccaggaacagcccccaaactcctcatctatgaaaataataagcgaccctcagggattcctgaccgattctctggctccaagtctggcacgtcagccaccctgggcatcaccggactccagactggggacgaggccgattattactgcggaacatgggatagcagcctgagtgttggggtattcggcggagggaccaagctgaccgtcctag

SEQ ID NO: 9117 - DNA, 322 bp, Homo sapiens
cagtctgtgttgacgcagccgccctcagtgtctgcggccccaggacaaaaggtcaccatctcctgctctgcaagcagctccaacttttacgtgtcctggtaccagcagctgccaggaacagcccccaaactcctcatctatgaaaatagtgagcgaccttcagggattcctgaccgattctctggctccaagtctggcacgtcagccaccctggccatcaccggagtccagactggggacgaggccgaatattactgcggaacatgggatagcaacctgagtgttggattattcggcggcgggaccaagctgaccgtcctag

SEQ ID NO: 9118 - DNA, 318 bp, Homo sapiens
aaattgtgttgacacagtctccagccaccctgtctttgtctccaggggaaagagccaccctctcctgcagggccagtcagggtggtagcagctacttagccgggtaccagcagaaacctggccaggctcccaggctcctcatctatgatacatgcaacagggccactggcatcccagccaggttcagtggcagtgggcctgggacagacttcactctcaccatcagcagcctagagcctgaagattttgcagcttattactgtcagcagcgtagcaactggctcactttcggcggagggaccaaggtggagatcaaac

SEQ ID NO: 9119 - DNA, 317 bp, Homo sapiens
aaattgtgttgacacagtctccagccaccctgtctttgtctccaggggaaagagccaccctctcctgcagggccagtcagggtgttagcagctacttagcctggtaccagcagaaacctggccagggtcccaggctcctcatctatgatgcatccaacagggccactggcatcccagccaggttcagtggcagcgggcctgggacagacttcactctcaccatcagcagcctagagcctgaagattttgcagtttattagtgtcagcggcgtagcaactggctcactttcggcggagggaccaaggtggagatcaaa

SEQ ID NO: 9120 - DNA, 322 bp, Homo sapiens; identical to SEQ ID NO: 4002

SEQ ID NO: 9121 - DNA, 322 bp, Homo sapiens; identical to SEQ ID NO: 4002

SEQ ID NO: 9122 - DNA, 322 bp, Homo sapiens
gccatccggatgacccagtctccatcctcattctctgcatctacaggagacagagtcaccatcacttgtcgggcgagtcagggtattagcagttatttagcctggtatcaacaaaaaccagggaaagcccctaagctcctgatctatgctgcatccactttgcaaagtggggtcccatcaaggttcagtggcagtggatctgggacagatttcactctcaccatcagctgcctgcagtctgaagattttgcaacttattactgtcaacagtattatagttacccctggacgttcggccaagggaccaaggtggaaatcaaac

SEQ ID NO: 9123 - DNA, 322 bp, Homo sapiens
gccatccggatgacccagtctccatcctcattctctgcatctacaggagacagagtcaccatcacttgtcgggcgagtcagggtattagcagttatttagcctggtatcagcaaaaaccagggaaagcccctaagctcctgatctatgctgcatccactttgcaaactggggtcccatcaaggttcagcggcagtggatctgggacagatttcactctcaccatcagctgcctgcagtctgaagattttgcaatatattactgtcaacagtattatagttacccctggacgttcggccaagggaccaaggtggaaatcaaac

SEQ ID NO: 9124 - DNA, 328 bp, Homo sapiens
gaaattgtgttgacgcagtctccaggcaccctgtctttgtctccaggggaaagagccaccctctcctgcagggccagtcagagtgttagcggcagctacttagcctggtaccagcagaaacctggccaggctcccaggctcctcatctatggtgcatccagcagggccactggcatcccagacaggttcagtggcagtgggtctgggacagacttcactctcaccatcagcagactggagcctgaagattttgcagtgtattactgtcagcagtatggtagctcaccgatgtgcagttttggccaggggaccaagctggagatcaaac

SEQ ID NO: 9125 - DNA, 328 bp, Homo sapiens; identical to SEQ ID NO: 9124

SEQ ID NO: 9126 - DNA, 328 bp, Homo sapiens; identical to SEQ ID NO: 9124

SEQ ID NO: 9127 - DNA, 328 bp, Homo sapiens; identical to SEQ ID NO: 9124

SEQ ID NO: 9128 - DNA, 340 bp, Homo sapiens
gacatcgtgatgacccagtctccagactccctggctgtgtctctgggcgagagggccaccatcaactgcaagtccagccagagtgttttatacagctccaacaataagaactacttagcttggtaccagcagaaaccaggacagcctcctaagctgctcatttactgggcatctacccgggaatccggggtccctgaccgattcagtggcagcgggtctgggacagatttcactctcaccatcagcagcctgcaggctgaagatgtggcagtttattactgtcagcaatattatagtactctctggacgttcggccaagggaccaaggtggaaatcaaac

SEQ ID NO: 9129 - DNA, 328 bp, Homo sapiens; identical to SEQ ID NO: 9124

SEQ ID NO: 9130 - DNA, 331 bp, Homo sapiens
cagtctgtgttgacgcagccgccctcagtgtctgcggccccaggacagaaggtcaccatctcctgctctggaaccagctccaacattgggaataattatgtatcctggtaccagcagctcccaggaacagcccccaaactcctcatttatgacaattatcagcgaccctcagggattcctgaccgattctctggctccaagtctggcacgtcagccaccctgggcatcaccggactccagactggggacgaggccgattattactgcggaacatgggatagcagcctgagtgctggggtgttcggcggagggaccaagctgaccgtcctag

SEQ ID NO: 9131 - DNA, 330 bp, Homo sapiens
cagtctgtgttgacgcagccgccctcagtgtctgcggccccaggacagaaggtcaccatctcctgctctggaagcagctccaacattggcaataattatgtatcctggtaccaacaactcccaggaacagcccccaaactcctcatttatgacaataataagcgaccctcagggattcctgaccgattctctggctccaagtctggcacgtcagccaccctggacatcaccggactccagactggggacgaggccgattattactgcggaacatgggataacagcctgagtggtggggtgttcggcggagggaccaaggtgaccgtccta

SEQ ID NO: 9132 - DNA, 331 bp, Homo sapiens
cagtctgtgttgacgcagccgccctcagtgtctgcggccccaggacagatggtcaccatctcctgctctggaagcagctccaacattgggaataattatgtatcctggtaccagcagctcccaggaacagcccccaaactcctcatttatgacaattataagcgaccctcagggattcctgaccgattctctggctccaagtctggcacgtcagtcaccctgggcatcaccggactccagactggggacgaggccgattattactgcggaacatgggatagcagcctgagtgttggggtgttcggcggagggaccaagctgaccgtcctag

SEQ ID NO: 9133 - DNA, 330 bp, Homo sapiens; identical to SEQ ID NO: 9131

SEQ ID NO: 9134 - DNA, 330 bp, Homo sapiens
cagtctgtgttgacgcagccgccctcagtgtctgcggccccaggacagaaggtcaccatctcctgctctggaagcagctccaacattggggctaattatgtatcctggtaccagcatctcccaggaacggcccccaaactcctcatttatgacaatactcagcgaccctcagggactcctgaccgattctctggctccaagtctggcacgacagccaccctggacatcaccggactccagactggggacgaggccgattattactgcggaacatgggataacagcctgagtgctggggtgttcggcggagggaccaggctggccgtccta

SEQ ID NO: 9135 - DNA, 330 bp, Homo sapiens
cagtctgtgctgacgcagccgccctcagtgtctgcggcccctggacagacggtctccatttcttgctctggaaacagctccaacattgccaacaattacgtatcttggtaccagcaactcccaggagcagcccccaaactcctcatttacgacaatgataaacgaccctcagggattcctgaccgattctctggctccaagtctggcacgtcagtcaccctgggcatcgccggactccagactggggacgaggccgattattactgcggaacatgggatagcaggctgagtgctggggtgttcggcggagggaccaagctgaccgtccta

SEQ ID NO: 9136 - DNA, 330 bp, Homo sapiens
cagtctgtgctgacgcagccgccctcagtgtctgcggcccctggacagacggtcaccatttcctgctctggcaacagctccaacattggcaataattacgtatcttggtaccagcaactcccaggagcagcccccaaactcctcatttatgacaatgataagcgaccctcagggactcctgaccgattctctggctccaagtctggcacgtcagtcaccctgggcatcaccggactccagactggggacgaggccgattattactgcggaacatgggatagcagtctgagtgctggggtgttcggcggagggacgaagttgaccgtccta

SEQ ID NO: 9137 - DNA, 330 bp, Homo sapiens
cagtctgtgctgacgcagccgccctcagtgtctgcggcccctggacagacggtcaccatttcctgctctggaagcagctccaacattgggaataattacatatcctggtaccagcagctcccaggagcagcccccagactcctcatttatgacaataatcaacgaccctcagggattcctgaccgattctctggctccaagtctggcacgtcagccaccctgggcatcaccggactccagactggggacgaggccgattattactgcggaacatgggatagtagcctgagtgctggggtgttcggcggagggaccaagctgaccgtccta

SEQ ID NO: 9138 - DNA, 331 bp, Homo sapiens
cagtctgtgctgacgcagccgccctcagtgtctgcggcccctggacagacggtcaccatgtcctgctctggaagcagctccaacattgggaataattatgtatcctggtaccagcagctcccaggaacagcccccaaactcctcatttatgacaataatcagcgaccctcagggattcctgaccgattctctggctccaagtctggcacgtcagccaccctgggcatcaccggactccagactggggacgaggccgattattactgcggaacatgggatagcagcctgagtgctggggtgttcggcggagggaccaagctgaccgtcctag

SEQ ID NO: 9139 - DNA, 330 bp, Homo sapiens
cagtctgtgctgacgcagccgccctcaatgtctgcggcccctggacagacggtcaccatttcctgctctggaagcagctccaacattgggagtaattacgtatcctggtaccagcagctcccaggagcagcccccaaactcctcatttatgacaataatcagcgaccctcagggattcctgaccgaatctctggctccaagtctggcacgtcagccaccctgggcatcaccggactccagactggggacgaggccgattattactgcggaacatgggatagcagtctgagtgctggggtgttcggcggagggaccaagctgaccgtccta

SEQ ID NO: 9140 - DNA, 334 bp, Homo sapiens
cagtctgtgttgacgcagccgccctcagtgtctggggccccagggcagaggatcaccatttcctgcactgggagcagatccaacctcggggcaaattatgatgtacactggtaccagcagcttccaggaacagtccccaaactcctcatctatggtaatagcaatcggccctcaggggtccctgaccgattctctggctccaagtctggcgcctcagcctccctggccatcactggactccaggctgaggatgaggctgattattactgccagtcctatgacaacagcctgagtgcttatgtcttcggaactgggaccaaggtcaccgtcctag

SEQ ID NO: 9141 - DNA, 334 bp, Homo sapiens; identical to SEQ ID NO: 9140

SEQ ID NO: 9142 - DNA, 334 bp, Homo sapiens
cagtctgtgttgacgcagccgccctcagtgtctggggccccagggcagaggatcaccatctcctgcactgggagcagatccaacctcggggcaaattatgatgtacactggtaccagcagcttccaggaacagtccccaaactcctcatctatggtaatagcaatcggccctcaggggtccctgaccgattctctggctccaagtctggcgcctcagcctccctggccatcactggactccaggctgaggatgaggctgattattactgccagtcctatgacagcagcctgagtgcttatgtcttcggaactgggaccaaggtcaccgtcctag

SEQ ID NO: 9143 - DNA, 334 bp, Homo sapiens; identical to SEQ ID NO: 9140

SEQ ID NO: 9144 - DNA, 334 bp, Homo sapiens
cagtctgtgttgacgcagccgccctcagtgtctggggccccagggcagaggatcaccatctcctgcactgggagcagatccaacctcggggcaaattatgatgtacactggtaccagcagcttccaggaacagtccccaaactcctcatctatggtaatagcaaccggccctcaggggtccctgaccgattctctggctccaagtctggcgcctcagcctccctggccatcactggactccaggctgaggatgaggctgattattactgccagtcgtatgacagcagcctgagtgcttatgtcttcggaactgggaccaaggtcaccgtcctag

SEQ ID NO: 9145 - DNA, 322 bp, Homo sapiens
gacatccagatgacccagtctccttccaccctgtctgcatctgtaggagacagagtcaccatcacttgccgggccagtcagagttttagtacctggttggcctggtatcagcagaaaccagggaaagcccctaagctcctgatccataaggcgtctactttagagagtggggtcccatcaaggttcagcggcagtggatctgggacagaattcactctcaccatcagcagcctgcagcctgatgattttgcaacttattactgccaacagtataatagttacccgtacacttttggccaggggaccaagctggggatcaaac

SEQ ID NO: 9146 - DNA, 322 bp, Homo sapiens; identical to SEQ ID NO: 9145

SEQ ID NO: 9147 - DNA, 322 bp, Homo sapiens
gacatccagatgacccagtctccttccaccctgtctgcatctgtaggagacagagtcaccatcacttgccgggccagtcagagttttagtacctggttggcctggtatcagcagaaaccagggaaagcccctaaactcctgatccataaggcgtctactttagagagtggggtcccatcaaggttcagcggcagtggatctgggacagaattcactctcaccatcaacagcctgcagcctgatgattctgcaacttattactgccaacagtataatagttacccgtacacttttggccaggggaccaaggtggggatcaaac

SEQ ID NO: 9148 - DNA, 322 bp, Homo sapiens; identical to SEQ ID NO: 9147

SEQ ID NO: 9149 - DNA, 322 bp, Homo sapiens
gacatccagatgacccagtctccttccaccctgtctgcatctgtaggagacagagtcaccatcacttgccgggccagtcagagttttagtacctggttggcctggtatcagcagaaaccagggaaagcccctaaactcctgatccataaggcgtctactttagagagtggggtcccatcaaggttcagcggcagtgcatctgggacagaattcactctcaccatcaacagcctgcagcctgatgattctgcaacttattactgccaacagtataatagttacccgtacacttttggccaggggaccaaggtggggatcaaac

SEQ ID NO: 9150 - DNA, 319 bp, Homo sapiens
gaaatactgatgacgcagtctccagccatcttgtctgtgtctccaggggaaagagccaccctctcctgttgggccagtcagagtgttagcacctacttagcctggtaccaacaaaaacctggccagcctcccaggctcctcatctatggtgcatccaccagggccactggtttcccagcccggttcagtggcagtgggtctgggacagagttcactctcaccatcaacagcctgcagtctgaggattttgcagtttattattgtcagcagcatgataacgggtggacgttcggccaagggaccaaggtggaaatcaaac

SEQ ID NO: 9151 - DNA, 319 bp, Homo sapiens
gaaatactgatgacgcagtctccagccatcttgtctgtgtctccaggggaaagagccaccctctcctgttgggccagtcagagtgttagcacctacttagcctggtaccaacaaaaacctggccagcctcccaggctcctcatctatggtgcatccaccagggccactggtttcccagcccggttcagtggcagtgggtctgggacagagttcactctcaccatcaacagcctgcagtctgaagattttgcagtttattattgtcagcagtatgataacgggtggacgttcggccaagggaccaaggtggaaatcaaac

SEQ ID NO: 9152 - DNA, 319 bp, Homo sapiens; identical to SEQ ID NO: 9151

SEQ ID NO: 9153 - DNA, 319 bp, Homo sapiens; identical to SEQ ID NO: 9151

SEQ ID NO: 9154 - DNA, 330 bp, Homo sapiens
cagtctgtgttgacgcagccgccctcagtgtctgcggccccaggacagaaggtcaccatctcctgctctggaagcagctccaacattggcaaaaattatgtatcctggtaccaacaactcccaggaacagcccccaaacttctcatttatgacaattatcagcgaccctcagggattcctgaccgattctctggctccaagtctggcacgtcagccaccctgggcatcaccggactccagactggggacgaggccgattattactgcggaacatgggatgacagcctgagtgctggggtgttcggcggagggaccaagctgaccgtccta

SEQ ID NO: 9155 - DNA, 331 bp, Homo sapiens
cagtctgtgttgacgcagccgccctcagtgtctgcggccccaggacagaaggtcaccatctcctgctctggaagcagctccaacattggcaaaaattatgtatcctggtaccaacaactcccaggaacagcccccaaacttctcatttatgacaattatcagcgaccctcagggattcctgaccgattctctggctccaagtctggcacgtcagccaccctgggcatcaccggactccagactggggacgaggccgattattactgcggaacatgggatgacagcctgagtgctggggtgttcggcggagggaccaagctgaccgtcctag

SEQ ID NO: 9156 - DNA, 330 bp, Homo sapiens
cagtctgtgttgacgcagccgccctcagtgtctgcggccccaggacagaaggtcaccatctcctgctctggaagcagctccaacattggcaaaaattatgtatcctggtaccaacaactcccaggaacagcccccaaacttctcatttatgacaattatcagcgaccctcagggattcctgaccgattctctggctccaagtctggcacgtcagccaccctgggcatcaccggactccagactggggacgaggccgattactactgcggaacatgggatgacagcctgagtgctggggtgttcggcggagggaccaagctgaccgtccta

SEQ ID NO: 9157 - DNA, 330 bp, Homo sapiens
cagtctgtgttgacgcagccgccctcagtgtctgcggccccaggacagaaggtcaccatctcctgctctggaagcagctccaacattggcaaaaattatgtatcgtggtaccaacaactcccaggaacagcccccaaacttctcatttatgacaattatcagcgaccctcagggattcctgaccgattctctggctccaagtctggcacgtcagccaccctgggcatcaccggactccagactggggacgaggccgattattactgcggaacatgggatgacagcctgagtgctggggtgttcggcggagggaccaagctgaccgtccta

SEQ ID NO: 9158 - DNA, 331 bp, Homo sapiens
caggctgccctgactcagcctgcctccgtgtcggggtctcctggacagtcgatcaccatctcctgcactgggcccagcagtgactttgatgtttatagctctgtctcctggtaccaacaactcccaggcaaagcccccaaactcatcatttatgatgtcaataatcggccctcagggtcttctgatcgcttctctggctccaagtctggcaacacggcctccctgaccatctctgggctccagactgaggacgaggctgattattattgcagttcatatgcaaccagcaagactgtagtctttggatctgggaccaaggtcaccgtcgtag

SEQ ID NO: 9159 - DNA, 331 bp, Homo sapiens
caggctgccctgactcagcctgcctccgtgtcggggtctcctggacagtcggtcaccatctcctgcactggaaccagcagtgactttgatgtttatagctctgtctcctggtaccaacagcacccaggcaaagcccccaaactcatcatttatgatgtcaataatcggccctcagggttttctgatcgcttctctggctccaagtctggcaacacggcctccctgaccatctctgggctccagactgaggacgaggctgattattattgcagttcatatgcaaccagcaagactgtagtctttggatctgggaccaaggtcaccgtcctag

SEQ ID NO: 9160 - DNA, 329 bp, Homo sapiens
caggctgccctgactcagcctgcctccgtgtcggggtctcctggacagtcgatcaccatctcctgcactgggcccagcagtgactttgatgtttatagctctgtctcctggtaccaacagctcccaggcaaagcccccaaactcatcatttatgatgtcaataatcggccctcagggtcttctgatcgcttctctggctccaagtctggcaacacggcctccctgaccatctctggactccagactgaggacgaggctgattatttttgcagtgcatatgcaaccagcaagactgtagtctttggctctgggaccaaggtcaccgtcct

SEQ ID NO: 9161 - DNA, 322 bp, Homo sapiens
gacatccagatgacccagtctccatcctccctgtctgcatctgtaggagacagagtcaccatcacttgccgggcaagtcagagcattagcaactatttaaattggtatcagcagaaaccagggaaagcccctaagctcctgatctatgctgcgtccagtttgcaaagtggggtcccatcaaggttcagtggcagtggatctgggacacatttcactctcaccatcagcagtctgcaacctgaagattttgcaacttactactgtcaacagagttacattaccctgtacacttttggccaggggaccaagctggagatcaaac

SEQ ID NO: 9162 - DNA, 322 bp, Homo sapiens; identical to SEQ ID NO: 9161

SEQ ID NO: 9163 - DNA, 322 bp, Homo sapiens; identical to SEQ ID NO: 9161

SEQ ID NO: 9164 - DNA, 326 bp, Homo sapiens
tcttctgaggtgactcaggaccctgctgtgtctgtggccttgggacagacagtcaggatcacatgccaaggagacaacctcagaagctattatgtaagttggtatcagcagaagccaggacaggcccctgtacttgtcatttatggtggaaatatgcggccctcagggatcccagaccgattctctggctccagctcaggaaacacggcttccttgaccatcactggggctcaggcggaagatgaggctgactattattgtaactcccgagacagcagtggtaaccatctggtggtattcggcggagggaccaagctgaccgtcct

SEQ ID NO: 9165 - DNA, 326 bp, Homo sapiens; identical to SEQ ID NO: 9164

SEQ ID NO: 9166 - DNA, 326 bp, Homo sapiens; identical to SEQ ID NO: 9164

SEQ ID NO: 9167 - DNA, 325 bp, Homo sapiens
gaaattgtgttgacgcagtctccaggcaccctgtctttgtctccaggggaaagagccaccctctcctgcagggccagtcaaagtgttagcagcagctacttagcctggtaccagcagaaacctggccaggctcccaggctcctcatctatgctacatccagcagggccactggcatcccagacaggttcagtggcagtgggtctgggacagacttcactctcaccatcagcagactggagcctgaagattttgcagtgtatcactgtcagcagtatggtagctcaccgtggacgttcggccaagggaccaaggtggaaatcaaac

SEQ ID NO: 9168 - DNA, 325 bp, Homo sapiens
gaaattgtgttgacgcagtctccaggtaccctgtctttgtctccaggggaaagagccaccctctcctgcagggccagtcagagtgttagcagcagctacttagcctggttccagcagcaacctggccaggctcccaggctcctcctctatgctgcatccagcagggccattggcatcccagacaggttcagtggcagtgggtctgggacagacttcactctcaccatcagcagactggagcctgaagattttgcagtgtattactgtcagcagtatggtagctcaccctggacgttcggccaagggaccaaggtggaaatcaaac

SEQ ID NO: 9169 - DNA, 325 bp, Homo sapiens
gaaattgtgttgacgcagtctccaggcaccctgtctttgtctccaggggagagagccaccctctcctgcagggccagtcagagtgttagcagcagctacttagcctggttccagcagaaacctggccaggctcccaggctcctcatctatgctgcatccagcagggccattggcatcccagacaggttcagtggcagtgggtctgggacagacttcactctcaccatcagcagactggagcctgaagattttgcagtgtattactgtcagcagtatggtacctcactgtggacgttcggccaagggaccaaggtggaaatcaaac

SEQ ID NO: 9170 - DNA, 325 bp, Homo sapiens
gaaattgtgttgacgcagtctccaggcacactgtctttgtctccaggggaaagagccaccctctcctgcagggccagtcagagtgttagcagcagctacttagcctggtaccagcagaagcctggccaggctcccaggctcctcatccatgttgcatccatcagggccactggcatcccagacaggtacagtggcagtgggtctgggacagacttcactctcaccatcagcagactggagcctgaagattttgcagtgtattactgtcagcagtatggtagctcacctcggacgttcggccaagggaccaagttggaaatgaaac

SEQ ID NO: 9171 - DNA, 325 bp, Homo sapiens
gaaattgtgttgacgcagtctccaggcacactgtctttgtctccaggggaaagagccaccctctcctgcagggccagtcagagtgttagcagcagctacttagcctggtaccagcagaagcctggccaggctcccaggctcctcatccatgttgcatccatcagggccactggcatcccagacaggtacagtggcagtgggtctgggacagacttcactctcaccatcagcagactggagcctgaagattttgcagtgtattactgtcagcagtatggtaggtcacctcggacgttcggccaagggaccaagttggaaatgaaac

SEQ ID NO: 9172 - DNA, 325 bp, Homo sapiens
gaaattgtgttgacgcagtctccaggcacactgtctttgtctccaggggaaagagccaccctctcctgcagggccagtcagagtgttagcagcagctacttagcctggtaccagcagaagcctggccaggctcccaggctcctcatctatggtgcatccagcagggccattggcatcccagacaggttcagtggcagtgggtctgggacagacttcactctcaccatcagcagactggagcctgaagattttgcagtgtattactgtcagcagtatggtagctcaccacggacgttcggccaagggaccaagttggaaatgaaac

SEQ ID NO: 9173 - DNA, 319 bp, Homo sapiens
tcctatgagctgactcagccactctcagtgtcagtggccctgggacagacggccaggattacctgtgggggaaacaacattgagactaaaaatgtgcactggtaccagcagaagccaggccaggcccctgtgctggtcatctatagggataacaaccggccctctgggatccctgagcgattctctggctccaactcggggaacacggccaccctgaccatcagcagagcccaagccggggatgaggctgactattactgtcaggtgtgggacagcagtactggggtattcggcggagggaccaagctgaccgtcctag

SEQ ID NO: 9174 - DNA, 319 bp, Homo sapiens
tcctatgagctgactcagccactctcagtgtcagtggccctgggacagacggccacgattacctgtgggggaatcaacattgaaggcaaaaatgtgcactggtaccagcagaagccaggccaggcccctgtgctggtcatctatagggataacaaccggccctttgggatccctgagcgattctctggctccaactcggggaacacggccaccctgaccatcagcagagcccaagccggggatgaggctgaatattactgtcaggtgtgggacagcagcactggggtattcggcggagggaccaagctgaccgtcctag

SEQ ID NO: 9175 - DNA, 331 bp, Homo sapiens
cagactgtggtgacccaggagccatcgttctcagtgtcccctggagggacagtcacactcacttgtggcttgaacactggctcagtctcttctagtttctaccccagctggtaccagcagaccccaggccaggctccacgctcgctcatctacaacacaaacactccctcttctggggtccctgatcgcttctctggctccatccttgggaacaaagctgccctcaccatcacgggggcccagccagatgatgaatctcaatattactgtttgctgtatgtgggtagtggcatttgggtgttcggcggagggacgaagctgaccgtcctag

SEQ ID NO: 9176 - DNA, 331 bp, Homo sapiens
cagactgtggtgacccaggagccatcgttctcagtgtcccctggagggacagtcacactcacttgtggcttgagcactggctcagtctcttctagtttctaccccagctggtaccagcagaccccaggccaggctccacgctcgctcatctacaacacaaacactcgctcttctggggtccctgatcgcttctctggctccatccttgggaacaaagctgccctcaccatcacgggggcccagccagatgatgaatctgaatattactgtttgctgtatgtgggtagtggcatttgggtgttcggcggagggacgaagctgaccgtcctag

SEQ ID NO: 9177 - DNA, 331 bp, Homo sapiens
cactctgtgttgacgcagccgccctcagtgtctgcggccccaggacagacggtcaccatctcctgctctggaagcagctccaacattggcaataattatgtatcctggtaccagcagctcccaggaacagcccccaaactcctcatttatgacaattatcagcgaccctcagggattcctgaccgattctctggctccaagtctggcacgtcggccaccctgggcatcaccggactccagactggggacgaggccgattattactgcggaacatgggatagcagcctgagtgccggggtgttcggcggagggaccaagctgaccgtcctag

SEQ ID NO: 9178 - DNA, 331 bp, Homo sapiens
cactctgtgttgacgcagccgccctcagtgtctgcggccccaggacagacggtcaccatctcctgctctggaagcagctccaacattggcaataattatgtatcctggtaccagcagctcccaggaacagcccccaaactcctcatttatgacaattatcagcgaccctcagggattcctgaccgattctctggctccaagtctggcacgtcggccaccctgggcatcaccggactccagactggggacgaggccgattattactgcggaacatgggataccagcctgagtggtggggtgttcggcggggggaccaagctgaccgtcctag

SEQ ID NO: 9179 - DNA, 322 bp, Homo sapiens
gaagtagtgatgacgcagtctccggccaccctgtctgtgtctccaggggaaacagccaccctctcctgcagggccagtcagagtgttagcagaaccttagcctggtaccaggtgaaacctggccaggctcccaggctcctcatctatggtgcatccaccagggccactggtatcccagccaggttcagtggcagtgggtctgggacagagttcactctcaccatcagcagcctgcagtctgaagattttgcagtttattactgtcagcagtatagttactggggcctcactttcggcggagggaccaaggtggagatcaaac

SEQ ID NO: 9180 - DNA, 320 bp, Homo sapiens
gaagtagtgatgacgcagtctccggccaccctgtctgtgtctccaggggaaacagccaccctctcctgcagggccagtcagagtgttagcagaaccttagcctggtaccaggtgaaacctggccaggctcccaggctcctcatgtatggtgcatccaccagggccactggtatcccagccaggttcagtggtagtgggtctgggacagagttcactctcaccatcagcagcctgcagtctgaagattttgcagtttattactgtcagcagtatagttactggggcctcactttcggcggagggaccaaggtggagatcaa

SEQ ID NO: 9181 - DNA, 322 bp, Homo sapiens
gacatccagatgacccagtctccatcctccctgtctgcatctgtaggagacagagtcaccatcacttgccaggcgagtcaggacattagcaactatttaaattggtatcagcagaaaccagggaaagcccctaaactcctgatctacgatgcatccaatttggaaacaggggtcccatcaaggttcagtggaagtggatctgggacaggttttagtttcaccatcaacaggctgcagcctgaagattttgcaacatattactgtcaacagtatgataatctcccgctcactttcggcggagggaccaaggtggagatcaaac

SEQ ID NO: 9182 - DNA, 322 bp, Homo sapiens; identical to SEQ ID NO: 9181

SEQ ID NO: 9183 - DNA, 340 bp, Homo sapiens
gacatcgtgatgacccagtctccagactccctggctgtgtctctgggcgagagggccaccatcaactgcaagtccagccagagtgttttatacagctccaacaataagaactacttagcttggtaccagcagaaaccaggacagcctcctaagctgctcatttactgggcatctacccgggaatccggggtccctgaccgattcagtggcagcgggtctgggacagatttcactctcaccatcagcagcctgcaggctgaagatgtggcagtttattactgtcagcaatatgatcgtactcctcggacgttcggccaagggaccaaggtggaaatcaaac

SEQ ID NO: 9184 - DNA, 340 bp, Homo sapiens; identical to SEQ ID NO: 9183

SEQ ID NO: 9185 - DNA, 331 bp, Homo sapiens
cagtctgccctgactcaacctccctccgcgtccgggtctcctggacagtcagtcaccttctcctgcactggaaccagcagtgacgttggtggttataactttgtctcctggtaccaacagcacccgggcaaagcccccagactcatgatttatgaggtcactaagcggccctcaggggtccctgatcgcttctctggctccaagtctggcaacacggcctccctgaccgtctctgggctccaggctgaggatgaggctgattattactgcagctcatatgcaggcagcaacaattttgtattcggcggagggaccacgctgaccgtcctag

SEQ ID NO: 9186 - DNA, 331 bp, Homo sapiens; identical to SEQ ID NO: 9185

SEQ ID NO: 9187 - DNA, 325 bp, Homo sapiens; identical to SEQ ID NO: 3243

SEQ ID NO: 9188 - DNA, 325 bp, Homo sapiens
gaaattgtgttgacgcagtctccaggcaccctgtctttgtctccaggggaaagagccaccctctcctgcagggccagtcagagtgttagcagcagctacttagcctggtaccagcagaaacctggccaggctcccaggcttctcatctatggtgcatccagcagggccattggcatcccagacaggttcagtggcagtgggtctgggacagacttcactctcaccatcagcagactggagcctgaagattttgcagtgtattactgtcagcagtatggtagctcaccgtggacgttcggccaagggaccaaggtggaaatcaaac

SEQ ID NO: 9189 - DNA, 325 bp, Homo sapiens
gaaattgtgttgacgcagtctccaggcaccctgtctttgtctccaggggaaagagccaccctctcctgcagggccagtcagagtgttagcagtagctacttagcctggtaccagcagaaacctggccaggctcccaggctcctcatctatagtacatccagcagggccactggcatcccagacaggttcagtggcagtgggtctgagacagacttcactctcaccatcagcagactggagcctgaagattttgcagtgtattactgtcagcagtatggtagctcaccgtggacgttcggccaggggaccaaggtggaaatcaaac

SEQ ID NO: 9190 - DNA, 325 bp, Homo sapiens
gaaattgtgttgacgcagtctccaggcaccctgtctttgtctccaggggaaagagccaccctctcctgcagggccagtcagagtgttagcagcagctacttagcctggtatcagcagaaacctggccaggctcccaggctcctcatctatagtgcatccagcagggccactggcatcccagacaggttcagtggcagtgggtctgggacagacttcactctcaccatcagcagactggagcctgaagattttgcagtgtattactgtcagcagtatggtagttcaccgtggacgttcggccaagggaccaaggtggaaatcaaac

SEQ ID NO: 9191 - DNA, 325 bp, Homo sapiens
gaaattgtgatgacgcagtctccaggcaccctgtctttgtctccaggggaaagagccaccctctcctgcagggccagtcagagtgtttccagcaactacttagcctggtaccagcagaaacctggccaggctcccaggctcctcatctacggtgtgtccagtagggccactggcatcccagacaggttcagtggcagcgggtctgggacagacttcactctcaccatcagtagactggagcctgaagattttgcagtgtattactgtcaccagtatgctggctcaccggtcaccttcgcccaagggacacggctggagattaaac

SEQ ID NO: 9192 - DNA, 325 bp, Homo sapiens
gaaattgtgatgacgcagtctccaggcaccctgtctttgtctccaggggaaagagccaccctctcctgcagggccagtcagagtgtttccagcaactacttagcctggtaccagcagaaacctggccaggctcccaggctcctcatctacggtgtgtccaatagggccactggcatcccagacaggttcagtggcagcgggtctgggacagacttcactctcaccatcagtagactggagcctgaagattttgcagtgtattactgtcaccagtatgctggctcaccggtcaccttcgcccaagggacacggctggagattaaac

SEQ ID NO: 9193 - DNA, 328 bp, Homo sapiens
caggctgtggtgactcaggagccctcactgactgtgtccccaggagggacagtcactctcacctgtggctccagcactggagctgtcaccagtggtcattatgcctactggttccagcagaagcctggccaagcccccaggacactgatttatgatacaagcaataaacactcctggacccctgcccggttctcaggctccctccttgggggcaaagctgccctgactctttcgggtgcgcagcctgaggatgaggctgagtattactgcttattctcctatagtggtattcgggtgttcggcggagggaccaaactgaccgtcctag

SEQ ID NO: 9194 - DNA, 328 bp, Homo sapiens; identical to SEQ ID NO: 9193

SEQ ID NO: 9195 - DNA, 337 bp, Homo sapiens
gatgttgtgatgactcagtctccactctccctgcccgtcactcttggacagccggcctccatctcctgcaggtctagtcaaagcctcgtatacagtgatggaaacatatacttcaattggtttcagcagaggccaggccaatctccaaggcgcctaatttataaggtttctaaccgggactctggggtcccagacagattcagcggcagtgggtcaggcactgatttcacactgaaaatcagcagggtggagactgaggatgtaggggtttattactgcatgcaaggtacacactggcctcccaccttcggccaagggacacgactggagattaaac

SEQ ID NO: 9196 - DNA, 337 bp, Homo sapiens
gatgttgtgatgactcagtctccactctccctgcccgtcacccttggacagccggcctccatctcctgcaggtctagtcaaagcctcgtatacagtgatggaaacatatacttcaattggtttcagcagaggccaggccaatctccaaggcgcctaatttataaggtttctaaccgggactctggggtcccagacagattcagcggcagtgggtcaggcactgatttcacactgaaaatcagcagggtggagactgaggatgtaggggtttattactgcatgcaaggtacacactggcctcccaccttcggccaagggacacgactggagattaaac

SEQ ID NO: 9197 - DNA, 325 bp, Homo sapiens
gaaattgtgttgacgcagtctccaggcaccctgtctttgtctccaggggaaagagccaccctctcctgcagggccagtcagagtgttaccagcagctacttagcctggtaccagcagaaacctggccaggctcccaggctcctcatctatggtgcatccagcagggccactggcatcccagacaggttcagtggcagtgggtctgggacagacttcactctcaccatcagcagactggagcctgaagattttgcagtgtattactgtcagcagtatggtacctcaccgtgcagttttggccaggggaccaagctggagatcaaac

SEQ ID NO: 9198 - DNA, 325 bp, Homo sapiens; identical to SEQ ID NO: 9197

SEQ ID NO: 9199 - DNA, 337 bp, Homo sapiens
cagtctgccctgactcagcctccctccgcgtccgggtctcctggacagtcagtcaccatctcctgcactggcaccagcagtgacgttggtggttataaccgtgtctcctggttccaacaccacccaggcaaagcccccagactcatgatttatgaggtcagtaagcggccctcaggggtccctgatcgcttctctggctccaagtctggcaacacggcctccctgaccgtctctgggctccaggctgaggatgaggctgattattactgcagctcatattcaggcagcaacaattcccgttatgtcttcggaactgggaccaaggtcaccgtcctag

SEQ ID NO: 9200 - DNA, 337 bp, Homo sapiens; identical to SEQ ID NO: 9199

SEQ ID NO: 9201 - DNA, 325 bp, Homo sapiens
gaaattgtgttgacgcagtctccaggcaccctgtctttgtctccaggagaaagagccaccctcacctgcagggccagtcagagtgttagcagcagctccttagtctggtaccagcagaaacccggccaggctcccaggctcctcatctatggtgcatccagcagggccactggcatcccagacaggttcagtggcagtgggtctgggacagacttcactctcaccatcagcagattggagcctgaagattttgcagtatattattgtcagcaatatgataattcagtgctcactttcggcggagggaccaaggtggagatcaaac

SEQ ID NO: 9202 - DNA, 325 bp, Homo sapiens
gaaattgtgttgacgcagtctccaggcaccctgtctttgtctccaggggaaagagccaccctcacctgcagggccagtcagagtgttagcagcagctccttagtctggtaccagcagaaacccggccaggctcccaggctcctcatctatggtgcatccagcagggccactggcatcccagacaggttcagtggcagtgggtctgggacagacttcactctcaccatcagcagattggagcctgaagattttgcagtgtattattgtcagcagtatggtagttcactgctcactttcggcggagggaccaaggtggagatcaaac

SEQ ID NO: 9203 - DNA, 331 bp, Homo sapiens
cagtctgtggtgactcagccaccctcagcgtctgggacccccgggcagagggtcaccatctcttgttctggaagcaactccaacatcggaagtaatactgtaaactggtaccagcagctcccaggaacggcccccaaagtcctcatctatagtaataatttgcggccctcgggggtccctgaccgattctctggctccaagtctggcacctcagcctccctggccatcagtgggctccagtctgaggatgaggctgagtattactgtgcagcatgggatgacagcctgaatggtccggtgttcggcggagggaccaagctgaccgtcctag

SEQ ID NO: 9204 - DNA, 331 bp, Homo sapiens; identical to SEQ ID NO: 9203

SEQ ID NO: 9205 - DNA, 322 bp, Homo sapiens; identical to SEQ ID NO: 837

SEQ ID NO: 9206 - DNA, 318 bp, Homo sapiens
gacatccagttgacccagtctccatcctccctgtctgcatctgtaggagacagagtcgccatcacttgccgggcaagtcagagcattagcaattatttaaattggtatcaacaaaaaccagggaaagcccctaagctcctgatctatggtgcatccaatttgcaaagtggggtcccatcgaggttcagtggcagtggatctgggacagatttcactctcaccatcaacagtctgcaacctgaagattttgcgactttctactgtcaacagacttacattagcccgtacacttttggccaggggaccaagctggagatc

SEQ ID NO: 9207 - DNA, 329 bp, Homo sapiens
gaaattgtgttgacgcagtctccaggcaccctgtctttgtctccaggggaaagagccaccctctcctgcagggccagtcagagtgttagcagcagctacttagcctggtaccagcagaaacctggccaggctcccaggctcctcatctatggtgcatccagcagggccactggcatcccagacaggttcagtggcagtgggtctgggacagacttcactctcaccatcagcagactggagcctgaagattttgcagtgtattactgtcagcagtatggtagctcacctcgaaggcaccttcggccaagggacacgactggagattaaac

SEQ ID NO: 9208 - DNA, 326 bp, Homo sapiens
gaaattgtgttgacacagtctccagccaccctgtctttgtctccaggggaaagagccaccctctcctgcagggccagtcagagtgttagcagctacttagcctggtaccaacagaaacctggccaggctcccaggctcctcatctatgatgcatccaacagggccactggcatcccagccaggttcagtggcagtgggtctgggacagacttcactctcaccatcagcagcctagagcctgaagattttgcagtttattactgtcagcagcgtagcaactggcctccaattcactttcggccctgggaccaaagtggatatcaaac

SEQ ID NO: 9209 - DNA, 337 bp, Homo sapiens
cagtctgtgatgacgcagccgccctcagtgtctggggccccagggcagagggtcaccatctcctgcactgggagcagctccaacatcggggcaggttatgatgtacactggtaccagcagcttccaggaacagcccccaaactcctcatctatcttaacagcaatcggccctcaggggtccctgaccgattctctggctccaagtctggcacctcagcctccctggccatcactgggctccaggctgaggatgaggctgattattactgccagtcctatgacagcagcctgagtggttatgtggtattcggcggagggaccaagctgatcgtcctag

SEQ ID NO: 9210 - DNA, 322 bp, Homo sapiens
tcctatgagctgactcagccaccctcagtgtccgtgtccccaggacagacagccagcatcacctgctctggagataaattgggggataaatatgcttgctggtatcagcagaagccaggccagtcccctgtgctggtcatctatcaagatagcaagcggccctcagggatccctgagcgattctctggctccaactctgggaacacagccactctgaccatcagcgggacccaggctatggatgaggctgactattactgtcaggcgtgggacagcagcactgggtatgtcttcggaactgggaccaaggtcaccgtcctag

SEQ ID NO: 9211 - DNA, 337 bp, Homo sapiens
gatattgtgatgactcagtctcctctctccctgcccgtcacccctggagagccggcctccatctcctgcaggtctagtcagagcctcctgcatagtaatggatacaactatttggattggtacctgcagaagccagggctgtctccacagctcctgatctatttgggttctaatcgggcctccggggtccctgacaggttcagtggcagtggatcaggcacagattttacactgaaaatcagcagcgtggaggctgaggatgttggggtttattactgcatgcaagctctacaaactcctcttatttttggccaggggaccaagctggagatcaaac

SEQ ID NO: 9212 - DNA, 333 bp, Homo sapiens
cagtctgtgctgacgcagccgccctcagtgtctggggccccaggacagagggtcaccatctcctgcactgggagcagctccaacatcggggcaggttttgatgttcactggtaccagcaggttccaggagcagcccccaaactcctcatctatggtaacaataatcgcccctcaggggtccctgaccgattctctgcctccaagtctggcacctcggcctccctggccatcagtgggctccaggatgaagatgaggctgattatttctgcctgtcctataacaccggcctgagtggttgggtgttcggcggagggaccaagctgaccgtccta

SEQ ID NO: 9213 - DNA, 333 bp, Homo sapiens
cagtctgtgttgacgcagccgccttcagtgtctgcggccccaggacagaaggtcaccatctcctgctctggaagcagctccgacatggggaattatgcggtatcctggtaccagcagctcccaggaacagcccccaaactcctcatctatgaaaataataagcgaccctcagggattcctgaccgattctctggctccaagtctggcacctcagccaccctgggcatcactggcctctggcctgaggacgaggccgattattactgcttagcatgggataccagcccgagagcttgagggtcttcggaactgggaccaaggtcaccgtcctag

SEQ ID NO: 9214 - DNA, 327 bp, Homo sapiens
tcttctgagctgactcaggaccctgctgtgtctgtggccttgggacagacagtcaggatcacatgccaaggagacagcctcagaagctattatgcaagctgatatcagctgcagccaggacaggcccctatacttgtcatctatgataaaaacgaccggccctcagggatcccagaccgattctctggctccagctcaggaaacacaccttcctttaccatcactggggctcaggcggaagatgaggctgactattactgtaactcccgggacagcagtggtaaccatcaggggtgttcggcggagggaccaacctgaccgtcctag

SEQ ID NO: 9215 - DNA, 331 bp, Homo sapiens
cagtctgccctgactcagcctgcctccgtgtctgggtctcctggacagtcgatcaccatctcctgcactggaaccagcagtgacgttggtggttataactatgtctcctggtaccaacaacacccagccaaagcccccaaactcatgatttatgatgtcagtaatcggccctcaggggtttctaatcgcttctctggctccaagtctggcaacacggcctccctgaccatctctgggctccaggctgaggacgaggctgattattactgcagctcatatagaagcagcagcgtttgggtgttcggcggagggaccaagctgaccgtcctag

SEQ ID NO: 9216 - DNA, 325 bp, Homo sapiens
tcctatgaactgacacagccaccctcggtgtcagtgtccccaggacaaacggccaggatcacctgctctggagatgcattgccaaaaaaatatgcttattggtaccagcagaagtcaggccaggcccctgtgctggtcatctatgaggacagcaaacgaccctccgggatccctgagagattctctggctccagctcagggacaatggccaccttgactatcagtggggcccaggtggaggatgaagctgactactactgttactcaacagacagcagtggtaatcattgggtgttcggcggagggaccaagctgaccgtcctag

SEQ ID NO: 9217 - DNA, 325 bp, Homo sapiens
gaaattgtgttgacgcagtctccaggcaccctgtctttgtctccaggggaaagagccaccctctcctgcagggccagtcagagtgttaccagcagctacttagcctggtaccagcagaaacctggccaggctcccagactcctcatctatggtgcatccagcagggccactggcatcccagacaggttcagtggcagtgggtctgggacagacttcactctcaccatcagcagactggagcctgaagattttgcagtgtattactgtcagcagtatggtagctcacccctcactttcggcggagggaccaaggtggagatcaaac

SEQ ID NO: 9218 - DNA, 322 bp, Homo sapiens
gaaatagtgatgacgcagtctccagccaccctgtctgtgtctccaggggaaagagccaccctctcctgcagggccagtcagagtgttagcagcaacttagcctggtaccagcagaaacctggccaggctcccaggctcctcatctatggtgcatccaccagggccactggtatcccagccaggttcagtggcagtgggtctgggacagagttcactctcaccatcagcagcctgcagtctgaagattttgcagtttattactgtcagcagtataataactggcctcggactttcggccctgggaccaaagtggatatcaaac

SEQ ID NO: 9219 - DNA, 325 bp, Homo sapiens
gaaattgtgttgacgcagtctccaggcaccctgtctttgtctccaggggatggagccaccctctcctgcagggccagtcagagtgttagcagcagctacttagcctggtaccagcagaaacctggccaggctcccaggctcctcatctatggtgcatccagcagggccactggcatcccagacaggttcagtggcagtgggtctgggacagacttcactctcaccatcagcagactggagcctgaagattttgcagtgtattactgtcagcactatggtaggtcactcttcactttcggcggagggaccaaggtggagatcaaac

SEQ ID NO: 9220 - DNA, 322 bp, Homo sapiens; identical to SEQ ID NO: 7733

SEQ ID NO: 9221 - DNA, 322 bp, Homo sapiens
gacatccagatgacccagtctccttccaccctgtctgcatctgtaggagacagagtcaccatcacttgccgggccagtcagagtattagtagctggttggcctggtatcagcagaaaccagggaaagcccctaagctcctgatctataaggcgtctagtttagaaagtggggtcccatcaaggttcagcggcagtggatctgggacagaattcactctcaccatcagcagcctgcagcctgatgattttgcaacttattactgccaacagtataatagttacccattcactttcggccctgggaccaaagtggatatcaaac

SEQ ID NO: 9222 - DNA, 330 bp, Homo sapiens
cagtctgtgttgacgcagccgccctcagtgtctgcggccccaggacaggaggtcaccatctcctgctctggaagcagctccaacattgggaataattatattgcttggtatcagcaacacccaggaacagcccccaaactcctcatttatgacattcatcagcgagcctcaggagttcctgcccgattcttaggttccaagtctggtacgtcagccaccctggacatcaccggactcgagactggggacgaggccgagtattactgcggatcatgggataccagccagagtgctttggtgttcggcggagggaccaaactgaccgtccta

SEQ ID NO: 9223 - DNA, 322 bp, Homo sapiens
gaaattgtgctgagtcagtctccagactttcagtctgtgactccaaaggagaaagtcaccatcacctgccgggccagtcagagcattggtagtagcttacactggtaccagcagaaaccagatcagtctccaaagctcctcatcaagtatgcttcccagtccttctcaggggtcccctcgaggttcagtggcagtggatctgggacagatttcaccctcaccatcaatagcctggaagctgaagatgctgcaacatattactgtcatcagagtagtagcttaccgctgacgttcggccaagggaccaaggtggaaatcaaac

SEQ ID NO: 9224 - DNA, 322 bp, Homo sapiens
gacatccagatgacccagtctccatcctccctgtctgcatctgtaggagccagagtcaccatcacttgccgggcaagtcagaacattatcaactatttaaattggtatcagcaaaaaccagggaaagcccctaatctcctgatctatgctgcatccagtttgcaaggtggggtcccatcaaggttcagtggcagtggatctgggacagatttcactctcaccatcagcagtctgcaacctgaagattttgcaacttactactgtcaacagagttacagtacccctctgactttcggcggagggaccaaggtggagatcaaac

SEQ ID NO: 9225 - DNA, 325 bp, Homo sapiens
gaaattgtgttgacgcagtctccaggcaccctgtgtttgtctccaggggaaagagccaccctctcctgcagggccagtcagagtgttagcagcagctacttagcctggtaccagcagaaacctggccaggctcccaggctcctcatctatggtgcatccagcagggccactggcatcgcagacaggttcagtggcagtgggtctgggacagacttcactctcaccatcagcagactggagcctgaggattttgcagtgtattactgtcagcagtatggtagctcaccgtacacttttggccaggggaccaagctggagatcaaac

SEQ ID NO: 9226 - DNA, 325 bp, Homo sapiens; identical to SEQ ID NO: 6024

SEQ ID NO: 9227 - DNA, 331 bp, Homo sapiens
cagtctgccctgactcagcctgcctccgtgtctgggtctcctggacagtcgatcaccatctcctgcactggaaccagcagtgacgttggtggttataactatgtctcctggtaccaacagcacccaggcaaagcccccaaactcatgatttatgatgtcagtaatcggccctcgggggtttctaatcgcttctctggctccaagtctggcaacacggcctccctgaccatctctgggctccaggctgaggacgaggctgattattactgcagctcatatacaagcagcagcacttatgtcttcggaactgggaccaaggtcaccgtcctag

SEQ ID NO: 9228 - DNA, 322 bp, Homo sapiens
gaaattgttctgactcagtctccagactttcagtctgtgactccaaaggagaaagtcaccatcacctgccgggccagtcagagcattggtagtagcttacactggtatcagcagaaaccagatcagtctccaaagctcctcatcaagtttgcttcccagtccatctcaggggtcccctcgaggttcagtggcagtggatctgggacagatttcaccctcaccatcaatagcctggaagctgaagatgctgcagcgtattactgtcatcagagtagtagtttacctcggacgttcggccaagggaccaaggtggaaatcaaac

SEQ ID NO: 9229 - DNA, 325 bp, Homo sapiens
gaaattgtgttgacgcagtctccaggcaccctgtctttgtctccaggggaaagagccaccctctcctgcagggccagtcagagtgttagcaacaagtacttagcctggtaccagcagaaacctggccaggctcccaggctcctcatctatggtgcatccagcagggccactggcatcccagacaggttcagtggcagtgggtctgggacagacttcactctcaccatcagcagactggagcctgaagattttgcagtgtatttctgtcagcagtatggtaggttacccatcaccttcggccaagggacacgactggagattaaac

SEQ ID NO: 9230 - DNA, 340 bp, Homo sapiens
gacatcgtgatgacccagtctccagactccctggctgtgtctctgggcgagagggccaccatcaactgcaagtccagccagagtgttttgtatagctccaacaataagaactacttagcttggtaccagcagaaaccaggacagcctcctaagctgctcatttactgggcatctacccgggaatccggggtccctgaccgattcagtggcagcgggtctgggacagatttcactctcaccatcagcagcctgcaggctgaagatgtggcagtttattactgtcagcaatattatagtactgccctcactttcggcggagggaccaaggtggagatcaaac

SEQ ID NO: 9231 - DNA, 334 bp, Homo sapiens
cagtctgtgctgacgcagccgccctcagtgtctggggccccagggcagagggtcaccatctcctgcactgggagcagctccaacatcggggcaggttatgatgtacactggtaccagcagcttccaggaacagcccccaaactcctcatgtatgttaacagcaatcggccctcaggggtccctgaccgattctctggctccaagtctggcaccgcagcctccctggccatcagtgggctccagggtgaggatgaggctgattattactgccagtcctatgacagcagcctgagtgccgtactattcggcggagggaccaagctgaccgtcctag

SEQ ID NO: 9232 - DNA, 331 bp, Homo sapiens
cagactgtggtgacccaggagccatcgttctcagtgtcccctggagggacagtcacactcacttgtggcttgagctctggctcagtctctactagttactaccccagctggtaccagcagaccccaggccaggctccacgcacgctcatctacagcacaaacactcgctcttctggggtccctgatcgcttctctggctccatccttgggaacaaagctgccctcaccatcacgggggcccaggcagatgatgaatctgattattactgtgtgctgtatatgggtagtggcatttgggtgttcggcggagggaccaagctgaccgtcctag

SEQ ID NO: 9233 - DNA, 325 bp, Homo sapiens
gaaattgtgttgacacagtctccagccaccctgtctttgtctccaggggaaagagccaccctctcctgcagggccagtcagagtgttagcaattacttagcctggtaccaacagaaacctggccaggctcccaggctcctcatctatgatgcatccaacagggccactggcatcccagccaggttcagtggcagtgggtctgggacagacttcactctcaccatcagcagcctagagcctgaagattttgcagtttattactgtcagcagcgtagcaactggcctccgctcactttcggcggagggaccaaggtggagatcaaac

SEQ ID NO: 9234 - DNA, 325 bp, Homo sapiens
gaaattgtgttgacacagtctccagccaccctgtctttgtctccaggggaaagagccaccctctcctgcagggccagtcagagtgttagcagctacttagcctggtaccaacagaaacctggccaggctcccaggctcctcatctatgatgcatccaacagggccactggcatcccagccaggttcagtggcagtgggtctgggacagacttcactctcaccatcagcagcctagagcctgaagattttgcagtttattactgtcagcagcgtagcaactggcctccgatcaccttcggccaagggacacgactggagattaaac

SEQ ID NO: 9235 - DNA, 331 bp, Homo sapiens
cagtctgccctgactcagcctgcctccgtgtctgggtctcctggacagtcgatcaccatctcctgcactggaaccagcagtgacgttggtggttataactatgtctcctggtaccaacagcacccaggcaaagcccccaaactcatgatttatgatgtcagtaatcggccctcaggggtttctaatcgcttctctggctccaagtctggcaacacggcctccctgaccatctctgggctccaggctgaggacgaggctgattattactgcagctcatatacaagcagcagcactctggtattcggcggaggggccaagctgaccgtcctag

SEQ ID NO: 9236 - DNA, 337 bp, Homo sapiens
gatattgtgatgactcagtctccactctccctgcccgtcacccctggagagccggcctccatctcctgcaggtctagtcagagcctcctgcatagtaatggatacaactatttggattggtacctgcagaagccagggcagtctccacacctcctgatctatttgggttctaatcgggcctccggggtccctgacaggttcagtggcagtggatcaggcacagattttacactgaaaatcagcagagtggaggctgaggatgttggggtttattactgcatgcaaggtctacaaactcctcggacgttcggccaagggaccaaggtggaaatcaaac

SEQ ID NO: 9237 - DNA, 331 bp, Homo sapiens; identical to SEQ ID NO: 7757

SEQ ID NO: 9238 - DNA, 332 bp, Homo sapiens
gatgttgtgatgactcagtctccactctccctgcccgtcacccttggacagccggcctccatctcctgcaggtctagtcaaagcctcgtatacagtgatggaaacacctacttgaattggtttcagcagaggccaggccaatctccaaggcgcctaatttataaggtttctaactgggactctggggtcccagacagattcagcggcagtgggtcaggcactgatttcacactgaaaatcagcagggtggaggctgaggatgttggggtttattactgcatgcaaggtacacactcagccgttcggccaagggaccaaggtggaaatcaaac

SEQ ID NO: 9239 - DNA, 322 bp, Homo sapiens
gacatccagatgacccagtctccatcctccctgtctgcatctgtaggagacagagtcaccatcacttgccgggcaagtcagagcgttagtgtttatttaaattggtatcagcagaaaccagggaaagcccctaagctcctgatctatgctgcatccactttgcaaagtggggtcccatcaaggttcagtggcagtggatctgggacagatttcactctcaccatcagcagtctgcaacctgaagattttgcaatttactactgtcaacagagttacattaccccttggacgttcggccaagggaccaacgtggaaatcaaac

SEQ ID NO: 9240 - DNA, 325 bp, Homo sapiens
gaaattgtgttgacgcagtctccaggcaccctgtctttgtctccaggggaaagagccaccctctcctgcagggccagtcagagtgttagcagcagctacttagcctggtaccaacagaaacctggccaggctcccaggctcctcatctatggtgcatccagcagggccactggcatcccagacaggttcagtggcagtgggtctgggacagacttcactctcaccatcagcagactggagcctgaagattttgcagtgtattactgtcagcagtatggtagctcacctcggacgttcggccaagggaccaaggtggaaatcaaac

SEQ ID NO: 9241 - DNA, 319 bp, Homo sapiens; identical to SEQ ID NO: 7651

SEQ ID NO: 9242 - DNA, 328 bp, Homo sapiens
gaaattgtgttgacgcagtctccaggcaccctgtctttgtctccaggggaaagagccaccctctcctgcagggccagtcagagtgttaggagcaactacttagcctggtaccagcagaaacctggccaggctcccaggctcctcatacatggtgcatccagcagggccactggaatcccagacaggttcagtggcagtgggtctgggacagacttcactctcaccatcagcagactggagcctgaagactttgcagtgtattactgtcagcagtatggtagctcacccccgctcactttcggcggagggaccaaggtggagatcaaac

SEQ ID NO: 9243 - DNA, 325 bp, Homo sapiens
gaaatagtgatgacgcagtctccagccaccctgtctgtgtctccaggggaaagagccaccctctcctgcagggccagtcagagtgttagtaataacttcttaggctggtaccagcagaagtttggccaggctcccaggctcctcatctatgatgcatacaacagggccactggcgtcccagacaggttcagtggcagtgggtctgggacagacttcactctcaccatcagtagagtggagcctgaagattttgcagtgtattactgtcagcagtataaagactggccgctcactttcggcggggggaccaaggtggagatcaaac

SEQ ID NO: 9244 - DNA, 322 bp, Homo sapiens
gaaataatgatgacgcagtctccagccaccttgtctgtgtctccaggggaaagagccaccctctcctgcagggccagtcagagtgttagcagcaacttagcctggtaccagcagaaacctggccaggctcccaggctcctcatctatggtgcatccaccagggccactggtatcccagccaggttcagtggcagtgggtctgggacagagttcactctcaccatcagcagcctgcagtctgaagattttgcagtttattactgtcagcagtataataactggccgtacacttttggccaggggaccaagctggagatcaaac

SEQ ID NO: 9245 - DNA, 331 bp, Homo sapiens
cagtctgccctgactcagcctgcctccgtgtctgggtctcctggacagtcgatcaccatctcctgcactggaaccagcagtgacgttggtggttatagttatgtctcctggtaccaacaccacccaggcaaagcccccaaactcttgatttatgatgtcaatgatcggccctcgggggtttctaatcgcttctctggctccaagtctggcaacacggcctccctgaccatctctgggctccaggctgaggacgaggctgattattactgtagttcatattcaagcagcagaaggggggtgttcggcggagggaccaagctgaccgtcctag

SEQ ID NO: 9246 - DNA, 330 bp, Homo sapiens
cagtctgccctgactcagcctgcctccgtgtctgggtctcctggacagtcgatcaccatctcctgcactggaaccagcagtgacattggtggttataactatgtctcctggtaccaacaacacccaggcaaagcccccaaactcatgatttatgatgtcagtgttcggccctcaggggtttctaatcgcttctctggctccaagtctggcaacacggcctccctgaccatctctgggctccatgctgaggacgaggctgattattactgcagctcatatacaagcagcagcactgtggtattcggcggagggtccaagctgaccgtccta

SEQ ID NO: 9247 - DNA, 322 bp, Homo sapiens
gacatccagatgacccagtctccatcctccctgtctgcatctgtaggagacagagtcaccatcacttgccgggcaagtcagagcattagcagctatttaaattggtatcagcagaaaccagggaaagcccctaagctcctgatctatgctgcatccagtttgcaaagtggggtcccatcaaggttcagtggcagtggatctgggacagatttcactctcaccatcagcagtctgcaacctgaagattttgcaacttactactgtcaacagagttacagtaccccgtgcagttttggccaggggaccaagctggagatcaaac

SEQ ID NO: 9248 - DNA, 330 bp, Homo sapiens
cagtctgccctgactcagcctccctccgtgtccgggtctcctggacagtcagtcaccatctcctgcactggaaccagcagtgacgttggtagttataaccgtgtctcctggtaccagcagcccccaggcacagcccccaaactcatgatttatgaggtcagtaatcggccctcaggggtccctgatcgcttctctgggtccaagtctggcaacacggcctccctgaccatctctgggctccaggctgaggacgaggctgattattactgcagctcatatacaagcagtaacactgtggtcttcggcggagggaccaagctgaccgtccta

SEQ ID NO: 9249 - DNA, 319 bp, Homo sapiens
tcctatgtgctgactcacccaccctcagtgtcagtggccccaggaaagacggccaggattacctgtgggggaaacaacattggaagtaaaagtgtgcactggtaccagcagaagccaggccaggcccctgtggtggtcatctattatgatagcgaccggccctcagggatccctgagcgattctctggctccaactctgggaacacggccaccctgaccatcagcagggtcgaagccggggatgaggccgactattactgtcaggtgtgggatagtagtagtgtggtattcggcggagggaccaagctgaccgtcctag

SEQ ID NO: 9250 - DNA, 325 bp, Homo sapiens
gacatccagatgacccagtctccatcctccctgtctacatctgtaggagacagagtcaccatcacttgccgggcaagtcagagcattaggagctatttaaattggtatcagcagaaaccagggaaagcccctaaactcctgatctatgctgcatccagtttgcaaagtggggtcccatcaaggttcagtggcagtggatctgggacagatttcaatctcaccatcagcagtctgcaacctgaagattttgcaacttactactgtcaacacagttacaggacctcgtgggtcactttcggccctgggaccaaagtggatatcaaac

SEQ ID NO: 9251 - DNA, 320 bp, Homo sapiens
gacatccagatgacccagtctccatcctccctgtctgcatctgtaggagacagagtcaccatcacttgccaggcgagtcaggacattagcagctatttaaattggtatcagcagaaaccagggaaagcccctaaactcctgatctacgttgcatccgttttggaaacaggggtcccatcaaggttcagtggaaatggatctgggacagattttgctttcaccatcagcagcctgcagcctgaagatattgcaacatattactgtcaacaatatcgtaatctcccgctcactttcggcggagggaccacggtggagagcaa

SEQ ID NO: 9252 - DNA, 325 bp, Homo sapiens
gaaattgtgttgacgcagtctccaggcaccctgtctttgtctccaggggaaagagccaccctctcctgcagggccagtcagagtgttagcagcagctacttagcctggtaccagcagaaacctggccaggctcccaggctcctcatctatggtgcctccagcagggccactggcatcccagacaggttcagtggcagtgggtctgggacagacttcactctcaccatcagcggactggagcctgaagattttgcagtgtattactgtcagcagtatggtagctctctattcactttcggccctgggaccaaagtggatatcaaac

SEQ ID NO: 9253 - DNA, 325 bp, Homo sapiens
gacatccagttgacccactctccatccttcctgtctgcatctgtaggagacagagtcaccatcacttgccgggccagtcagggcattagcagttatttagcctggtatcagcaaaaaccagggaaagcccctaagctcctgatctatgctgcatccactttgcaaagtggggtcccatcaaggttcagcggcagtggatctgggacagaattcactctcacaatcagcagcctgcagcctgaagattttgcaacttattactgtcaacagcttaatagttaccctccgtacacttttggccaggggaccaagctggagatcaaac

SEQ ID NO: 9254 - DNA, 331 bp, Homo sapiens
cagtctgtgctgacgcagccgccctcagtgtctggggccccagggcagagggtcaccatctcctgcactgggagcagctccaacatcggggcaggttatgatgtacactggtaccagcagcttccaggaacagcccccaaactcctcatctatggtaacagcaatcggccctcaggggtccctgaccgattctctggctccaagtctggcacctcagcctccctggccatcagtgggctccaggctgaggatgaggctgattattactgccagtcctatgacagcagcctgagtggtttattcggcggagggaccaagctgaccgtcctag

SEQ ID NO: 9255 - DNA, 322 bp, Homo sapiens; identical to SEQ ID NO: 1668

SEQ ID NO: 9256 - DNA, 322 bp, Homo sapiens; identical to SEQ ID NO: 3870

SEQ ID NO: 9257 - DNA, 322 bp, Homo sapiens
tcctatgagctgacacagccaccctcggtgtcagtgtccccaggacagacggccaggatcacctgctctggagatgcattgccaaagcaatatgcttattggtaccagcagaagccaggccaggcccctgtggtggtgatatataaagacagtgagaggccctcagggatccctgagcgattctctggctccagctcagggacaacagtcacgttgaccatcagtggagtccaggcagaagacgaggctgactattactgtcaatcaacagacagcagtggtacttgggtgttcggcggagggaccaagctgaccgtcctag

SEQ ID NO: 9258 - DNA, 331 bp, Homo sapiens
cagtctgccctgactcagcctgcctccgtgtctgggtctcctggacagtcgatcaccatctcctgcactggaaccagcagtgacgttggtgcttataactatgtctcctggtaccaacagcacccaggcaaagcccccaaactcatgatttatgatgtcagtaatcggccctcaggggtttctaatcgcttctctggctccaagtctggcaacacggcctccctgaccatctctgggctccaggctgaggacgaggctgattattactgcagctcatatacaagcagcagcactcgggtgttcggcggagggaccaagctgaccgtcctag

SEQ ID NO: 9259 - DNA, 325 bp, Homo sapiens; identical to SEQ ID NO: 2320

SEQ ID NO: 9260 - DNA, 322 bp, Homo sapiens; identical to SEQ ID NO: 837

SEQ ID NO: 9261 - DNA, 340 bp, Homo sapiens
gacatcgtgatgacccagtctccagactccctggctgtgtctctgggcgagagggccaccatcaactgcaagtccagccagagtgttttatacagctccaacaataagaactatttagcttggtaccagcagaaaccaggacagcctcctaaactactcatttactgggcatctacccgggaatccggggtccctgaccgattcagtggcagcgggtctgggacagatttcactctcaccatcagcagcctgcaggctgaagatgtggcagtttattactgtcagcaatattatagtactccgtggacgttcggccgagggaccaaggtggagatcaaac

SEQ ID NO: 9262 - DNA, 331 bp, Homo sapiens
cagtctgccctgactcagcctccctccgcgtccgggtctcctggacagtcagtcaccatctcctgcactgggaccagcagtgacgttggtggttataactatgtctcctggtaccaacagcccccaggcaaagcccccaaactcatgatttatgaggtcaataagcggccctcaggggtccctgatcgcttctctggctccaagtctggcaacacggcctccctgaccgtctctgggctccaggctgtggatgaggctgattattactgcagctcatatgcaggcagcaacaattttgtcttcggaactgggaccaaggtcaccgtcctag

SEQ ID NO: 9263 - DNA, 325 bp, Homo sapiens
tcttctgagctgactcaggaccctgctgtgtctgtggccttgggacagacagtcaggatcacatgccaaggagacagcctcagaatctattatgcagcctggtaccagcagaagccaggacaggcccctgtacttgtcatctatggtaaaaacaaccggccctcagggatcccagaccgattctctggctccagctcaggaaacacagcttcctttaccatcactggggctcaggcggaagatgaggctgactattactgtaactcctgggacagcagtggtaaccatctgctattcggcggagggaccaagctgaccgtcctag

SEQ ID NO: 9264 - DNA, 331 bp, Homo sapiens; identical to SEQ ID NO: 3914

SEQ ID NO: 9265 - DNA, 337 bp, Homo sapiens
gatattgtgatgactcagtctccactctccctgcccgtcacccctggagagccggcctccatctcctgcaggtctagtcagagcctcctgcatagtaatggatacaactatttggattggtacctgcagaagccagggcagtctccacagctcctgatctatttgggttctaatcgggcctccggggtccctgacaggttcagtggcagtggatcaggcacagattttacactgaaaatcagcagagtggaggctgaggatgttggggtttattactgcatgcaagctctacaaactcccctcactttcggcggagggaccaaggtggagatcaaac

SEQ ID NO: 9266 - DNA, 337 bp, Homo sapiens
cagtctgtgctgactcagccaccctcagcgtctgggacccccgggcagagggtcaccatctcttgttctggaagcagctccaacatcggaagtaattatgtatactggtaccagcagctcccaggaacggcccccaaactcctcatctatagtaataatcagcggccctcaggggtccctgaccgattctctggctccaagtctggcacctcagcctccctggccatcagtgggctccggtccgaggatgaggctgattattactgtgcagcatgggatgacagcctgagtggtcttaattgggtgttcggcggagggaccaagctgaccgtcctag

SEQ ID NO: 9267 - DNA, 322 bp, Homo sapiens
gccatccggatgacccagtctccatcctcattctctgcatctacaggagacagagtcaccatcacttgtcgggcgagtcagggtattagcagttatttagcctggtatcagcaaaaaccagggaaagcccctaagctcctgatctatgctgcatccactttgcaaagtggggtcccatcaaggttcagcggcagtggatctgggacagatttcactctcaccatcagctgcctgcagtctgaagattttgcaacttattactgtcaacagtattatagttaccctcgcactttcggcggagggaccaaggtggagatcaaac

SEQ ID NO: 9268 - DNA, 329 bp, Homo sapiens
cagtctgccctgactcagcctccctccgcgtccgggtctcctggacagtcagtcaccatctcctgcactggaaccagcagtgacgttggtggttataactatgtctcctggtaccaacagcacccaggcaaagcccccaaactcatgatttatgaggtcagtaagcggccctcaggggtccctgatcgcttctctggctccaagtctggcaacacggcctccctgaccgtctctgggctccaggctgaggatgaggctgattattactgcagctcatatgcaggcagcaacaattgggtgttcggcggagggaccaagctgaccgtcct

SEQ ID NO: 9269 - DNA, 322 bp, Homo sapiens; identical to SEQ ID NO: 4554

SEQ ID NO: 9270 - DNA, 331 bp, Homo sapiens
cagtctgccctgactcagcctgcctccgtgtctgggtctcctggacagtcgatcaccatctcctgcactggaaccagcagtgacgttggtggttataactatgtctcctggtaccaacagcacccaggcaaagcccccaaactcatgatttatgatgtcagtaatcggccctcaggggtttctaatcgcttctctggctccaagtctggcaacacggcctccctgaccatctctgggctccaggctgaggacgaggctgattattactgcagctcatatacaagcagcagcactcgggtcttcggaactgggaccaaggtcaccgtcctag

SEQ ID NO: 9271 - DNA, 322 bp, Homo sapiens
gacatccagatgacccagtctccttccaccctgtctgcatctgttggagacagagtcaccatcacttgccgggccagtcagagtattagtagctggttggcctggtatcagcagaaaccagggaaagcccctaagctcctgatctataaggcgtctagtttagaaagtggggtcccatcaaggttcagcggcagtggatctgggacagaattcactctcaccatcagcagcctgcagcctgatgattttgcaacttattactgccaacagtataatagttattctcggacgttcggccaagggaccaaggtggaaatcaaac

SEQ ID NO: 9272 - DNA, 322 bp, Homo sapiens; identical to SEQ ID NO: 1668

SEQ ID NO: 9273 - DNA, 334 bp, Homo sapiens
cagtctgccctgactcagcctgcctccgtgtctgggtctcctggacagtcgatcaccatctcctgcactggaaccagcagtgacgttggtggttataactatgtctcctggtaccaacagcacccaggcaaagcccccaaactcatgatttatgatgtcagtaatcggccctcaggggtttctaatcgcttctctggctccaagtctggcaacacggcctccctgaccatctctgggctccaggctgaggacgaggctgattattactgcagctcatatacaagcagcagcactcatgtggtattcggcggagggaccaagctgaccgtcctag

SEQ ID NO: 9274 - DNA, 322 bp, Homo sapiens; identical to SEQ ID NO: 837

SEQ ID NO: 9275 - DNA, 322 bp, Homo sapiens; identical to SEQ ID NO: 3870

SEQ ID NO: 9276 - DNA, 343 bp, Homo sapiens
gacatcgtgctgacccagtctccagactccctggctgtgtctctgggcgagagggccaccatcaactgcaagtccagccagagtcttttatacgccttcaataataagaattacttagcttggtaccagcagaaaccaagacagcctcctaaactgctcatttactgggcatctacccgggaatccggggtccctgaccgattcagtggcagcgggtctgggacagatttcactctcaccatcagcagcctgcaggctgaagatgtggcagtttattactgtcagcaatattttagtactcctccgtacacttttggccaggggaccaagctggagatccaac

SEQ ID NO: 9277 - DNA, 319 bp, Homo sapiens
tcctatgagctgactcagccaccctcagtgtccgtgtccccgggacagacagccaccatcacctgctctgcagataaattggaatataaatatgcttactggtatcaacaaaaggcaggccactcccctgtgttggtcatctatgaagataccaagcggccctcagggatccctgagcgattctctggctccaactctgggaacacagccactctgaccatcagcgggacccagactatggatgaggctgactattactgtcaggcgtgggacatcagcaatgcggcattcggcggagggaccaagctgtccgtcctag

SEQ ID NO: 9278 - DNA, 325 bp, Homo sapiens
gaaatagtgatgacgcagtctccagccaccctgtctgtgtctccaggggaaagagccaccctctcctgcagggccagtcagagtgttagcagcaacttagcctggtaccagcagaaacctggccaggctcccaggctcctcatctatggtgcatccaccagggccactggtatcccagccaggttcagtggcagtgggtctgggacagagttcactctcaccatcagcagcctgcagtctgaagattttgcagtttattactgtcagcagtataataactggcctccctccagttttggccaggggaccaagctggagatcaaac

SEQ ID NO: 9279 - DNA, 322 bp, Homo sapiens; identical to SEQ ID NO: 3566

SEQ ID NO: 9280 - DNA, 331 bp, Homo sapiens
cagtctgtgttgacgcagccgccctcagtgtctgcggccccaggacagaaggtcaccatctcctgctctggaagcacctccaacattggagataattatgtatcgtggtaccagcacctcccaggaacagcccccaaactcctcatttatgacaatcatgtgcgaccctcagggattcctgaccgattctctggctccaagtctggcacgtccgccaccctggccatcaccggactccagactggggacgaggccgattattactgcggaacatgggatagcagcctgagtgctggggtgttcggcggagggaccaaggtgaccgtcctag

SEQ ID NO: 9281 - DNA, 325 bp, Homo sapiens; identical to SEQ ID NO: 3560

SEQ ID NO: 9282 - DNA, 334 bp, Homo sapiens
cagtctgtgctgacgcagccgccctcagtgtctggggccccagggcagagggtcaccatctcctgcactgggagcagctccaacatcggggcaggttatgatgtacactggtaccagcagcttccaggaacagcccccaaactcctcatctatggtaacagcaatcggccctcaggggtccctgaccgattctctggctccaagtctggcacctcagcctccctggccatcactgggctccaggctgaggatgaggctgattattactgccagtcctatgacagcagcctgagtctttgggtgttcggcggagggaccaagctgaccgtcctag

SEQ ID NO: 9283 - DNA, 337 bp, Homo sapiens
gatattgtgatgacccagactccactctctctgtccgtcacccctggacagccggcctccatctcctgcaagtctagtcagagcctcctgcatagtgatggaaagacctatttgtattggtacctgcagaagacaggccaacctccacagctcctgatctatgaagtttccaaccggttctctggagtgccagataggttcagtggcagcgggtcagggacagatttcacactgaaaatcagccgggtggaggctgaggatgttgggatttattactgcatgcaaagtatacagcttcctctcactttcggcggagggaccagggtggagatcaaac

SEQ ID NO: 9284 - DNA, 325 bp, Homo sapiens
tcctatgagctgacacagccaccctcggtgtcagtgtccccaggacaaacggccaggatcacctgttctggagatgcattgccaaaaaaatatgcttattggtaccagcaaaagtcaggcctggcccctgtgctggtcatctatgaggactacaaacgaccctccgggatccctgagagattctctggctccagctcagggacaatggccaccttgactatcagtggggcccaggtggaggatgaagctgactactactgttactcaacagacagcagtggtcatcaaagggtgttcggcggagggaccaagctgaccgtcctag

SEQ ID NO: 9285 - DNA, 323 bp, Homo sapiens
gaaattgtaatgacacagtctccagccaccctgtctttgtctccaggggaaagagccaccctctcctgcagggccagtcagagtgttagcagcagctacttatcctggtaccagcagaaacctgggcaggctcccaggctcctcatctatggtgcatccaccagggccactggcatcccagccaggttcagtggcagtgggtctgggacagacttcactctcaccatcagcagcctgcagcctgaagattttgcagtttattactgtcagcaggattataacttcaaggacgttcggccaagggaccaaggtggaaatcaaac

SEQ ID NO: 9286 - DNA, 325 bp, Homo sapiens; identical to SEQ ID NO: 4861

SEQ ID NO: 9287 - DNA, 331 bp, Homo sapiens
cagtctgtactgactcagccaccctcaacgtctgggacccccgggcagagggtcaccatctcttgttctggaagcagctccaacatcggaagaaatactgtaaattggtaccagcagctcccaggaacggcccccaaactcctcatctctagtaataatcagcggccctcaggggtccctgaccgattctctggctccaagtctggcacctcagcctccctggccatcagtgggctccagtctgaggatgaggctgattattactgtgcagcatgggatgacagcctgagtgattttgtcttcggaactgggacccaggtcaccgtcctag

SEQ ID NO: 9288 - DNA, 331 bp, Homo sapiens
cagtctgccctgactcagcctccctccgcgtccgggtctcctggacagtcagtcaccatctcctgcactggaaccagcagtgacgttggtcgttataactatgtctcctggtaccaacagcacccaggcaaagcccccaaacccatgatttatgaggtcagtaagcggccctcaggggtccctgatcgcttctctggctccaagtctggcaacacggcctccctgattgtctctgggctccaggctgaggatgaggctgattatttttgcagctcatatgcaggcagcaacaatttggtattcggcggagggaccaaactgaccgtcctag

SEQ ID NO: 9289 - DNA, 322 bp, Homo sapiens; identical to SEQ ID NO: 1645

SEQ ID NO: 9290 - DNA, 325 bp, Homo sapiens; identical to SEQ ID NO: 1809

SEQ ID NO: 9291 - DNA, 331 bp, Homo sapiens
cagtctgtattgacgcagccgccctcagtgtctgcggccccaggacagaaggtcaccatctcctgctctggaagcagctccaacattgggaataattatgtatcctggtaccagcagctcccaggaacagcccccaaactcatcatctatgaaaataataagcgaccctcagggatccctgaccgattctctggctccaagtctggcacgtcagccaccctgggcatcaccggactccagactggggacgaggccgattattactgcggaacatgggatagcagactgagtttttatgtcttcggaactgggaccaaggtcaccgtcctag

SEQ ID NO: 9292 - DNA, 322 bp, Homo sapiens
gccatccggatgacccagtctccatcctcattctctgcatctacaggagacagagtcaccatcacttgtcgggcgagtcagggtattagcagttatttagcctggtatcagcaaaaaccagggaaagcccctaagctcctgatctatgctgcatccactttgcaaagtggggtcccatcaaggttcagcggcagtggatctgggacagatttcactctcaccatcagctgcctgcagtctgaagattttgcaacttattactgtcaacagtattatagttacccggtccacttcggccaagggacacgactggagattaaac

SEQ ID NO: 9293 - DNA, 328 bp, Homo sapiens; identical to SEQ ID NO: 1767

SEQ ID NO: 9294 - DNA, 322 bp, Homo sapiens; identical to SEQ ID NO: 851

SEQ ID NO: 9295 - DNA, 314 bp, Homo sapiens
gacatccagatgacccagtctccatcctccctgtctgcatctgtaggagacagagtcaccatcacttgccgggcgagtcagggcattagcaattatttagcctggtatcagcagaaaccagggaaagttcctaagctcctgatctatgctgcatccactttgcaatcaggggtcccatctcggttcagtggcagtggatctgggacagatttcactctcaccatcagcagcctgcagcctgaagatgttgcaacttattactgtcaaaagtataacagtgcccctccgccctgggaccaaagtggatatcaaac

SEQ ID NO: 9296 - DNA, 325 bp, Homo sapiens
gacatccagatgacccagtctccatcctccctgtctgcatctgtaggagacagagtcaccatcacttgccgggcaagtcagagcattagcagctatttaaattggtatcagcagaaaccagggaaagcccctaagctcctgatctatgctgcatccagtttgcaaagtggggtcccatcaaggttcagtggcagtggatctgggacagatttcactctcaccatcagcagtctgcaacctgaagattttgcaacttactactgtcaacagagttacagtacccctcggatcaccttcggccaagggacacgactggagattaaac

SEQ ID NO: 9297 - DNA, 331 bp, Homo sapiens
cagtctgtgttgacgcagccgccctcagtgtctgcggccccaggacagaaggtcaccatctcctgctctggaagcagctccaccattgggaataattatgtatcctggtaccagcagctcccaggaacagcccccaaactcctcatttatgacaataataagcgaccctcagggattcctgaccgattctctggctccaagtctggcacgtcagccaccctgggcatcaccggactccagactggggacgaggccgattattactgcggaacatgggatagcagcctgagtgaccgggtgttcggcggagggaccaagctgaccgtcctag

SEQ ID NO: 9298 - DNA, 331 bp, Homo sapiens
cagtctgccctgactcagcctccctccgcgtccgggtctcctggacagtcagtcaccatctcctgcactggaaccagcagtgacgttcgtgcttataactctgtctcctggtaccgacagcacccaggcaaagcccccaaactcatgatttatgaagtcactaagcggccctcaggggtccctgatcgcttctctggctccaagtctggcaacacggcctccctgaccgtctctgggctccaggctgaggatgaggctgattattactgcagctcatatgcaggcggcaacaatgtggtgttcggcggagggaccaagctgaccgtcctag

SEQ ID NO: 9299 - DNA, 322 bp, Homo sapiens; identical to SEQ ID NO: 1668

SEQ ID NO: 9300 - DNA, 340 bp, Homo sapiens; identical to SEQ ID NO: 4579

SEQ ID NO: 9301 - DNA, 322 bp, Homo sapiens; identical to SEQ ID NO: 1822

SEQ ID NO: 9302 - DNA, 331 bp, Homo sapiens
cagactgtggtgacccaggagccatcgttctcagtgtcccctggagggacagtcacactcacttgtggcttgagctctggctcagtctctactagttactaccccagctggtaccagcagaccccaggccaggctccacgcacgctcatctacagcacaaacactcgctcttctggggtccctgatcgcttctctggctccatccttgggaacaaagctgccctcaccatcacgggggcccaggcagatgatgaatctgattattactgtgtgctgtatatgggtagtggcatttatgtcttcggaactgggaccaaggtcaccgtcctag

SEQ ID NO: 9303 - DNA, 322 bp, Homo sapiens; identical to SEQ ID NO: 7911

SEQ ID NO: 9304 - DNA, 331 bp, Homo sapiens
cagtctgccctgactcagcctgcctccgtgtctgggtctcctggacagtcgatcaccatctcctgcactggaaccagcagtgatgttgggagttataaccttgtctcctggtaccaacagcacccaggcaaagcccccaaactcatgatttatgagggcagtaagcggccctcaggggtttctaatcgcttctctggctccaagtctggcaacacggcctccctgacaatctctgggctccaggctgaggacaaggctgattattactgctgctcatatgcaggtagtagcacttgggtgttcggcggagggaccaagctgaccgtcctag

SEQ ID NO: 9305 - DNA, 331 bp, Homo sapiens
cagtctgccctgactcagcctccctccgcgtccgggtctcctggacagtcagtcaccatctcctgcactggaaccagcagtgacattggtggttataattatgtctcctggtaccagcagcacccaggcaaagcccccaaactcataatttatgaggtcagtcagcggccctcaggggtccctgatcgcttctctggctccaagtctggcaacacggcctccctgaccgtctctggcctccaggctgaggatgaggctgattattactgcagctcatatgcaggcagcaacaatttggtcttcggcggagggaccaagctgaccgtcctag

SEQ ID NO: 9306 - DNA, 320 bp, Homo sapiens
gacatccagatgacccagtctccatcctccctgtctgcatctgtaggagacagagtcaccatcacttgccaggcgagtcacgacattaacaactatttaaattggtctctgcagaaaccaaggaaagcccctaagctcctgatctacgatgcatccaagttggaaacaggggtcccattaaggttcagtggaagcggatctgggacagattttactttcaccgtcagcagcctgcagcctgaagatattgtaatatattactgtcaacagtgtgattatctccctcactttcggcggagggaccaaggtggagatcaaac

SEQ ID NO: 9307 - DNA, 332 bp, Homo sapiens
cagcctgtgctgactcaatcgccctctgcctctgcctccctgggagcctcggtgaagctcacctgcactctgagcagtgggcacagcagctacgccatcgcatggcatcagcagcagccagagaagggcccccggttcttgatgaaactgaacactgatggcagccacaacaagggggacgggatccctgatcgcttctcaggctccagttctggggctgagcgctacctcaccatctccagcctccagtctgaagatgaggctgactattactgtcagacctggggcgctggcattcgggtgttcggcggagggaccaagctgaccgtcct

SEQ ID NO: 9308 - DNA, 334 bp, Homo sapiens
cagtctgtgctgacgcagccgccctcagtgtctggggccccagggcagagggtcaccatctcctgcactgggagcagctccaacatcggggcaggttatgatgtacactggtaccagcagcttccaggaacagcccccaaactcctcatctatggtaacagcaatcggccctcaggggtccctgaccgattctctggctccaagtctggcacctcagcctccctggccatcactgggctccaggctgaggatgaggctgattattactgccagtcctttgacagcagcctgagtggtgtggtgttcggcggagggaccaagctgaccgtcctag

SEQ ID NO: 9309 - DNA, 322 bp, Homo sapiens
gacatccagatgacccagtctccatcctccctgtctgcatctgtcggagacagagtcaccatcacttgccaggcgactcaggacattagcaactatttacattggtatcagcagaaaccagggaaagcccctaagctcctgatctacgatgcatccaatttggaaacaggggtcccatcaaggttcagtggaagtggatctgggacagattttactttcaccatcagcagcctgcagcctgaagatattgcaacatattactgtctacagtatgataatctcctgtggacgttcggccaagggaccaaggtggaaatcaaac

SEQ ID NO: 9310 - DNA, 331 bp, Homo sapiens
cagtctgccctgactcagcctcgctcagtgtccgggtctcctggacagtcagtcaccatctcctgcactggaaccagcagtgatgttggtggttataactttgtctcctggtaccaacagcacccaggcaaagcccccaaactcataatttatgatgtcattgagcggccctcaggggtccctgatcgcttctctggctccaagtctggcaacacggcctccctgaccatctctgggctccaggctgaggatgaggctgattattactgctgctcatatgcaggcacctacactttggtattcggcggtgggacccagctgaccgtcctag

SEQ ID NO: 9311 - DNA, 328 bp, Homo sapiens
cagtctgccctgactcagcctccctccgcgtccgggtctcctggacagtcagtcaccatctcctgcactggaaccagcagtgacgttggtggttataactatgtctcctggtaccaacagcacccagacaaagcccccaaactcatgatttatgaggtcagtaagcggccctcaggggtccctgatcgcttctctggctccaagtctggcgacacggcctccctgaccgtctctgggctccaggctgaagatgaggctgattattactgcagctcatatgcaggcagcaatgtgctattcggcggagggaccaagctgaccgtcctag

SEQ ID NO: 9312 - DNA, 331 bp, Homo sapiens
cagtctgccctgactcagcctccctccgcgtccgggtctcctggacagtcagtcaccatctcctgcactggaaccagcagtgacgttggtggttataactatgtctcctggtaccaacagcacccaggcaaagcccccaaactcatgatttatgaggtcagtaagcggccctcaggggtccctgatcgcttctctggctccaagtctggcaacacggcctccctgaccgtctctgggctccaggctgaggatgaggctgactattactgcagctcatatgcaggcagcagcaatttggtatttggcggagggaccaagctgaccgtcctag

SEQ ID NO: 9313 - DNA, 337 bp, Homo sapiens
aattttatgctgactcagccccactctgtgtcggagtctccggggaagacggtaaccatctcctgcacccgcagcagtggcagcattgccagcaactatgtgcagtggtaccagcagcgcccgggcagtgcccccaccactgtgatctatgaggataaccaaagaccctctggggtccctgatcggttctctggctccatcgacagctcctccaactctgcctccctcaccatctctggactgaagactgaggacgaggctgactactactgtcagtcttatgatagcagcaatcattatgtggtattcggcggagggaccaagctgaccgtcctag

SEQ ID NO: 9314 - DNA, 331 bp, Homo sapiens
cagcttgtggtgactcaatcgccctctgcctctgcctccctgggagcctcggtcaagctcacctgcactctgagcagtgggcacagcagctacgccatcgcatggcatcagcagcagccagagaagggccctcggtacttgatgaagcttaacagtgatggcagccacagcaagggggacgggatccctgatcgcttctcaggctccagctctggggctgagcgctacctcaccatctccagcctccagtctgaggatgaggctgactattactgtcagacctggggcactggcattttattcggcggagggaccaagctgaccgtcctag

SEQ ID NO: 9315 - DNA, 330 bp, Homo sapiens
cagcttgtgctgactcaatcgccctctgcctctgcctccctgggagcctcggtcaagctcacctgcactctgagcagtgggcacagcagcaacgtcatcgcatggcatcagctgcagccagagaagggccctcggtatttgatgatgcttaacagtgatggcagccacaacaagggggacgggatccctgatcgcttctcaggctccagctctggggctgagcgctacctcaccatctccagcctccagtctgaggatgaggctgactattactgtcagacctggggcactggcattttattcggcggagggaccaagctgaccgtccta

SEQ ID NO: 9316 - DNA, 323 bp, Homo sapiens
gaaatagtgatgacgcagtctccaggcaccctgtctgtgtctccaggggaaagagccaccctctcctgcagggccagtcagagtgttagcagcaacttagcctggtaccagcagaaacctggccaggctcccaggctcctcatctatggtgcatccaccagggccactggtatcccagccaggttcagtggcagtgggtctgggacagagttcactctcaccatcagcagcctgcagtctgaagattttgcagtttattactgtcagcagtataataactggctccctctcactttcggcggagggaccaaggtgaaaatcaa

SEQ ID NO: 9317 - DNA, 322 bp, Homo sapiens
tcctatgagctgactcagccaccctcagtgtccgtgtccccaggacagacagccagcatcacctgctctggagataaattgggggataaatatgcttgctggtatcagcagaagccaggccagtcccctatattggtcatctatgaagatagtaagcggccctcagggatccctgagcgattctctggctccaactctgggaacacagccactctgaccatcagcgggacccaggctatggatgaggctgactattactgtcaggcgtgggacagcagcacttctgtggtattcggcggagggaccaagctgaccgtcctag

SEQ ID NO: 9318 - DNA, 322 bp, Homo sapiens
gaaatagtgatgacgcagtctccagccaccctgtctgtgtctccaggggaaagagccaccctcccctgcagggccagtcagaatattagcagcaacttagcctggtaccagcagagacctggccaggctcccaggctcctcctctatggtgcatccagcagggccactggtatcccagccaggttcagtggcagtgggtctgggacagagttcactctcaccatcaggagcctgcagtctgaagattttgcagtttattactgtcagcagtataataactggcctctcactttcggccctgggaccaaagtggatatcaaac

SEQ ID NO: 9319 - DNA, 322 bp, Homo sapiens
gacatccagatgacccagtctccttccaccctgtctgcatctgtaggagacagagtcaccatcacttgccgggccagtcagagtattagtagctggttggcctggtatcagcagaaaccagggaaagcccctaagctcctgatctataaggcgtctagtttagaaagtggggtcccatcaaggttcagcggcagtggatctgggacagaattcactctcaccatcagcagcctgcagcctgatgattttgcaacttattactgccaacagtataatagttatccgtacacttttggccaggggaccaagctggagatcaaac

SEQ ID NO: 9320 - DNA, 322 bp, Homo sapiens
gaaaatgtgttgacgcagtctccaggcaccctgtctttgtctccgggggaaagagccaccctctcctgcagggccactgagcctgttagcagcgtctatttcgcctggtatcagcaaaaacctggccaggctcccaggctcctcatctatggtgcatccagcagggccactggcatcccagacaggttcagtggcagtgggtctgggacagacttcactctcaccatcagcagactggagcctgaagattctgcactgtattattgtcaacagtatgctacctcaccctcctttggccaggggaccaagctggagatcaaac

SEQ ID NO: 9321 - DNA, 319 bp, Homo sapiens
gaaattgtgttgacgcagtctccaggcaccctgtctttgtctccaggggaaagagccaccctctcctgcagggccagtcagactgttagtggcacctacttagcctggtatcagcagaaacctggccaggctcccaggctcctcatctatggtgcttccagcagggccactggcgtcccagacaggttcagtggcagtgggtctggggcagacttcactctcaccatcagcagcctggagcctgaagattttgcagtgtattactgtcagcagtatgctacctcagccaccttcggccaagggacacgactggagatta

SEQ ID NO: 9322 - DNA, 328 bp, Homo sapiens
cagtctgtcttgacgcagccgccctcagtgtctgcggccccaggacagaaggtctccatctcctgctctggaagcagctccaacattggaaatagttatgtatcctggtaccagcagctcccagggacagcccccaaactcctcatctatgaaaataataagcgaccctcagggattcctgaccgattctctggctccaagtctggcacgtcagccaccctgggcatcaccggactccagactggggacgaggccaattattattgcggaatatggcatagcagcctgagtgcggtgttcggcggagggaccaagctgaccgtcctag

SEQ ID NO: 9323 - DNA, 322 bp, Homo sapiens
gacatccagatgacccagtctccttccaccctgtctgcatctgtaggagacagagtcaccatcacttgccgggccagtcagagtattagtagctggttggcctggtatcagcagaaaccagggaaagcccctaagctcctgatctataaggcgtctagtttagaaagtggggtcccatcaaggttcagcggcagtggatctgggacagaattcactctcaccatcagcagcctgcagcctgatgattttgcaacttattactgccaacagtataatagttacccgttcacttttggccaggggaccaagctggagatcaaac

SEQ ID NO: 9324 - DNA, 322 bp, Homo sapiens
gacatccagatgacccagtctccatcctccctgtctgcatctgtaggagacagagtcaccatcacttgccgggcaagtcagagcattagcaactatttaaattggtatcaccagaaaccagggaaagcccctaagctcctgatctatgctgcatccagtttgcaaagtggggtcccatcaaggttcagtggcagtggatctgggacagatttcactctcaccatcagcagtctgcaacctgaagattttgcaagttactactgtcaacagacttacaatacccctcccacttttggccaggggaccaagctggagatcaaac

SEQ ID NO: 9325 - DNA, 337 bp, Homo sapiens
gatattgtgatgactcagtctccactctccctgcccgtcacccctggagagccggcctccatctcctgcaggtctagtcagagcctcctgcatagtgatggatacaactatttggattggtacctgcagaagccagggcagtctccacagctcctgatctatttggtttctaatcgggcctccggggtccctgacaggttcagtggcagtggatcaggcacagattttacactgaaaatcagcagagtggaggctgaggatgttggggtttattactgcatgcaagctctacaaactccattcactttcggccctgggaccaaagtggatatcaaac

SEQ ID NO: 9326 - DNA, 334 bp, Homo sapiens
cagtctgtgctgacgcagccgccctcagtgtctggggccccagggcagagggtcaccatctcctgcactgggagcagctccaacatcggggcaggttatgatgtacactggtaccagcagcttccaggaacagcccccaaactcctcatctatggtaacagcaatcggccctcaggggtccctgaccgattctctggctccaagtctggcacctcagcctccctggccatcagtgggctccaggctgaggatgaggctgattattactgccagtcctatgacagcagcctgagtggttcgttgatcggcggagggaccaagctgaccgtcctag

SEQ ID NO: 9327 - DNA, 322 bp, Homo sapiens; identical to SEQ ID NO: 1798

SEQ ID NO: 9328 - DNA, 331 bp, Homo sapiens
cagtctgccctgactcagcctccctccgcgtccgggtctcctggacagtcagtctccatctcctgcactgggaccagcggtgacgttggtggttataactatgtctcctggtaccaacaccacccaggcaaagcccccaaactcatgatttctgaggtcagtaagcggccctcaggggtccctgatcgtttctctggctccaagtctggcaacacggcctccctgaccgtctctgggctccaggctgaggatgaggctgattattactgcagctcatatgcaggcagcaacaatttggtgttcggcggagggaccaagctgaccgtcctag

SEQ ID NO: 9329 - DNA, 322 bp, Homo sapiens
gacatccagatgacccagtctccatcttccgtgtctgcatctgtaggagacagagtcaccatcacttgtcgggcgagtcagggtattagcagctggttagcctggtatcagcagaaaccagggaaagcccctaagctcctgatctatgctgcatccagtttgcaaagtggggtcccatcaaggttcagcggcagtggatctgggacagatttcactctcaccatcagcagcctgcagcctgaagattttgcaacttactattgtcaacaggctaacagtttcccgatcaccttcggccaagggacacgactggagattaaac

SEQ ID NO: 9330 - DNA, 325 bp, Homo sapiens
gacatccagatgacccagtctccatcctccctgtctgcatctgtaggagacagagtcaccatcacttgccgggcgagtcagggcattagcaattatttagcctggtatcagcagaaactagggaaaggtcctaagctcctgatctatgatgcttccactttgcaatcaggggtcccatctcggttcagtggcagtggatctgggacggatttcactctcaccatcagcagcctgcagcctgaagatgttgcaacttattactgtcaaaagtataaccgtgtcccgcttttcactttcggccctgggaccaaagtaaatatcaaac

SEQ ID NO: 9331 - DNA, 325 bp, Homo sapiens
gaaattgtgttgacgcagtctccaggcaccctgtctttgtctccaggggaaagagccaccctctcctgcagggccagtcagagtgttagcagcagctacttagcctggtaccagcagaaacctggccaggctcccaggctcctcatctatggtgcatccagcagggccactggcatcccagacaggttcagtggcagtgggtctgggacagacttcactctcaccatcagcagactggagcctgaagattttgcagtgtattactgtcagcagtatggtagctcacctcgaacttttggccaggggaccaagctggagatcaaac

SEQ ID NO: 9332 - DNA, 322 bp, Homo sapiens
tcctatgagctgactcagccaccctcagtgtccgtgtccccaggacagacagccagcatcacctgctctggagataaattgggggataaatatgcttgctggtatcagcagaagccaggccagtcccctgtgctggtcatctatcaagatagcaagcggccctcagggatccctgagcgattctctggctccaactctgggaacacagccactctgaccatcagcgggacccaggctatggatgaggctgactattactgtcaggcgtgggacagcagcactgcaggggtcttcggaactgggaccaaggtcaccgtcctag

SEQ ID NO: 9333 - DNA, 322 bp, Homo sapiens; identical to SEQ ID NO: 837

SEQ ID NO: 9334 - DNA, 322 bp, Homo sapiens
gacatccagatgacccagtctccatcatccctgtctacatctgtaggagacagagtcaccatcacttgccgggcaagtcagagcattagcagctatttaagttggtatcagcagaaaccagggaaagcccctaagctcctgatctatgctgcatccagtttgcaaagtggggtcccatcaaggttcagtggcagtggatctgggacagagttcactctcaccctcagcagtctgcaacctgaagattttgcaacttactactgtctacagagttacagtcccccgtacagttttggccaggggaccaagctggagatcaaac

SEQ ID NO: 9335 - DNA, 322 bp, Homo sapiens
gaaattgtgttgacacagtctccagccaccctgtctttgtctccaggggaaagagccaccctctcctgcagggccagtcagagtgttagcagctacttagcctggtaccaacagaaacctggccaggctcccaggctcctcatctatgatgcatccaacagggccactggcatcccagccaggttcagtggcagtgggtctgggacagacttcactctcaccatcagcagcctagagcctgaagattttgcagtttattactgtcagcagcgtagcaactggcctcggaccttcggccaagggacacgactggagattaaac

SEQ ID NO: 9336 - DNA, 325 bp, Homo sapiens
gacatccagttgacccagtctccatcctccctgtctgcatctgtaggagacagagtcaccatcacttgccgggtgagtcagggcattagcagttatttaaattggtatcggcagaaaccagggaaagttcctaagctcctgatctatagtgcatccaatttgcaatctggagtcccatctcggttcagtggcagtggatctgggacagatttcactctcactatcagcagcctgcagcctgaagatgttgcaacttattacggtcaacggacttacaatgcccctcctcgaactttcggccctgggaccaaagtggatatcaaac

SEQ ID NO: 9337 - DNA, 330 bp, Homo sapiens
cagtctgtactgactcagccaccctcagcgtctgggacccccgggcagagggtcaccatctcttgttctggaagcagctccaacatcggaagtaataccgtaaactggtaccagcaggtcccaggagcggcccccaaactcctcatcgatactaataatcagcggccctcaggggtccctgaccgattctctggctccaagtctggcacctcagcctccctggccatcagtgggctccagtctgaggatgaggctgatttttactgtgcagcatgggatgacagcctgaatgcttgggtgttcggcggagggaccaagctgaccgtccta

SEQ ID NO: 9338 - DNA, 326 bp, Homo sapiens
cagtctgccctgactcagcctgcctccgtgtctgggtctcctggacagtcgatcaccatctcctgcactggaaccagcagtgatgttgggacttataaccttgtctcctggtaccaacagcacccaggcaaagcccccaaactcatgatttatgagggcagtaagcggccctcaggggtttctaatcgcttctctggctccaagtctggcaacacggcctccctgacaatctctgggctccaggctgaggacgaggctgattattactgctgctcatatgcaggtcagcccaaggccaaccccactgtcactctgttcccgccctc

SEQ ID NO: 9339 - DNA, 322 bp, Homo sapiens
gacatccagatgacccagtctccttccaccctgtctgcatctgtaggagacagagtcaccatcacttgccgggccagtcagagtattagtagctggttggcctggtatcagcagaaaccagggaaagcccctaagctcctgatctataaggcgtctagtttagaaagtggggtcccatcaaggttcagcggcagtggatctgggacagaattcactctcaccatcagcagcctgcagcctgatgattttgcaacttattactgccaacagtataatagttattcgatcaccttcggccaagggacacgactggagattaaac

SEQ ID NO: 9340 - DNA, 322 bp, Homo sapiens
gaaacagtgatgtcgcagtctccaggcaccctgtctgtgtctccaggggaaagagccaccctctcctgcagggccagtcagagtgttagccgcaacttagcctggtaccagcagaaacctggccaggctcccaggctcctcatctatggtgcatccaccagggccgctggtatcccaggcaggttcagtggcagtgggtctgggacagatttcactctcaccatcagcagcctgcagtctgaagattttgcagtttattactgtcagcagtataatgactggcctcggaccttcggccaagggacacgactggagattaaac

SEQ ID NO: 9341 - DNA, 331 bp, Homo sapiens
cagtctgccctgactcagcctgcctccgtgtctgggtttcctggacagtcgatcaccatctcctgcgctggaaccagcagtgacgttggtggttttgactacgtctcctggtaccaacaacacccaggcaaagtccccaaactcataatttatgatatcagtgatcggccctcagggatttctgatcgcttctctggctccaagtctggcaacacggcctccctgaccatctctggtctccaggctgaggacgaggctgattattactgcagctcatatacaagcatcagcactcaggtattcggcggggggaccaagctgaccgtcctag

SEQ ID NO: 9342 - DNA, 331 bp, Homo sapiens
cagtctgtgctgactcagccaccctcagcgtctgggacccccgggcagagggtcaccatctcttgttctggaagcagctccaacatcggaagtaattatgtatactggtaccagcagctcccaggaacggcccccaaactcctcatctatagtaataatcagcggccctcaggggtccctgaccgattctctggctccaagtctggcacctcagcctccctggccatcagtgggctccggtccgaggatgaggctgattattactgtgcagcatgggatgacagcctgagtggttgggtgttcggcggagggaccaagctgaccgtcctag

SEQ ID NO: 9343 - DNA, 334 bp, Homo sapiens; identical to SEQ ID NO: 1621

SEQ ID NO: 9344 - DNA, 325 bp, Homo sapiens
gaaatagtgatgacgcagtctccagccaccctgtctgtgtctccaggggaaggagccaccctctcctgcagggccagtcagagtgttagcagcaacttagcctggtaccagcagaaacctggccaggctcccaggctcctcatctatggtgcatccaccagggccactggtatcccagccaggttcagaggcagtgggtctgggacagagttcactctcaccattagcagcctgcagtctgaagattttgcagtttatttctgtcagcagtctaaaaactggcctctcatcaccttcggccaagggacacgactggagattaaac

SEQ ID NO: 9345 - DNA, 322 bp, Homo sapiens
gacatccacatgacccagtctccatcctccctgtctgcatctgtgggagacagagtcaccatcacttgccaggcgagtcacgacattaccaattatttaagttggtatcaacagaaacccgggaaagcccctagactcctgatctacgatgcatccaatttggaaacaggggtcccatcaaggttcagtggaagtggatctgggacagattttactttcaccatcagcagcctgcagcctgaagatattgcaacatactactgtcaacagtatgatagtcttccattcactttcggccctgggaccaaagtggatatcaaac

SEQ ID NO: 9346 - DNA, 325 bp, Homo sapiens
gaaattgtgttgacacagtctccagccaccctgtctttgtctccaggggaaagagccaccctctcctgcagggccagtcagagtgttagcagctacttagcctggtaccaacagaaacctggccaggctcccaggctcctcatctatgatgcatccaacagggccactggcatcccagccaggttcagtggcagtgggtctgggacagacttcactctcaccatcagcagcctagagcctgaagattttgcagtttattactgtcagcagcgtagcaactggcctccggagagtttcggccctgggaccaaagtggatatcaaac

SEQ ID NO: 9347 - DNA, 324 bp, Homo sapiens
tcctatgagctgacacagccaccctcggtgtcagtgtccccaggacaaacggccaggatcacctgctctggagatgcattgccaaaaaaatatgcttattggtaccagcagaagtcaggccaggccccagtgctggtcatctatgaggacaacaaacgaccctccgggatccctgagagattctctggctccagctcagggacaatggccaccttgactatcagtggggcccaggtggaggatgaagctgactactactgttactccacagacagcagtgctaatcatagggtgttcggcggagggaccaagctgaccgtccta

SEQ ID NO: 9348 - DNA, 331 bp, Homo sapiens
cagtctgtggtgactcagccaccctcagcgtctgggacccccgggcagagggtcaccatctcttgttctggaagcagctccaacatcggaactaattatatatactggtaccagcagctcccaggaacggcccccaaactcctcatctatagtgataatcagcggccctcaggggtccctgaccgattctctggctccaggtctggcacctcagcctccctggccatcagtgggctccggtccgacgatgaggctgattattactgtgcagcatgggatgacagcctgagtggttatgtcttcggaactgggaccaaggtcaccgtcctag

SEQ ID NO: 9349 - DNA, 340 bp, Homo sapiens
gatattgtgatgactcagtctccagtctccctgcccgtcacccctggagagccggcctccatctcctgcaggtctagtcagagcctcctgcatagtaatggatacaattacttggattggtatctgcagaagccagggcagtctccacagctcctgatctatttgggttctaatcgggcctccggggtccctgacaggttcagtggcagtggatcaggcacagattttacactgaaaatcagcagagtggaggctgaggatgttggagtctattactgcatgcaagctctacaaactcctccatttactttcgcccctgggaccaaagtggaaatcgaac

SEQ ID NO: 9350 - DNA, 328 bp, Homo sapiens
cagtctgccctgactcagcctcgctcagtgtccgggtctcctggacagtcagtcaccatctcctgcactggaaccagcagtgatgttggtggttataactatgtctcctggtaccaacagcacccaggcaaagcccccaaactcatgatttatgatgtcagtaagcggccctcaggggtccctgatcgcttctctggctccaagtctggcaacacggcctccctgaccatctctgggctccaggctgaggatgaggctgattattactgctgctcatatgcaggcagctggagggtgttcggcggagggaccaagctgaccgtcctag

SEQ ID NO: 9351 - DNA, 340 bp, Homo sapiens
gatattgtgatgactcagtctccactctccctgcccgtcacccctggagagccggcctccatctcctgcaggtctagtcagagcctcctgcatagtaatggatacaattatttggattggtatctgcagaagccagggcagtctccacagctcctgatctatttgggttctaatcgggcctccggggtccctgacaggttcagtggcagtggatcaggcacagattttacactgaaaatcagcagagtggaggctgaggatgttggagtctattactgcatgcaagctctacaaactcctccatttactttcgcccctgggaccaaagtggaaatcgaac

SEQ ID NO: 9352 - DNA, 331 bp, Homo sapiens
cagtctgccctgactcagcctggctccgtgtctgggtctcctggacagtcgatcaccgtctcctgcactggaaccagcagcgacgttggtggttataactatgcctcctggtaccaacagcacccaggcaaagcccccaaactcataatttatggtgtcagtaatcggccctcaggggtttctaatcgcttctctggctccaagtctggcaacacggcctccctgaccatctctggtctccagcctgaggacgaggctgattattattgcagctcatatacaagcagtaccacttatgtcttcggaactgggaccaaggtcaccgtcctag

SEQ ID NO: 9353 - DNA, 322 bp, Homo sapiens; identical to SEQ ID NO: 929

SEQ ID NO: 9354 - DNA, 325 bp, Homo sapiens; identical to SEQ ID NO: 1548

SEQ ID NO: 9355 - DNA, 328 bp, Homo sapiens
tcctatgagctgacacagccaccctcggtgtcagtgtccccaggacaaacggccaggatcacctgctctggagatgcattgccaaaaaaatatgcttattggtaccagcagaagtcaggccaggcccctgtgctggtcatctatgaggacagcaaacgaccctccgggatccctgagagattctctggctccagctcagggacaatggccaccttgactatcagtggggcccaggtggaggatgaagctgactactactgttactcaacagacagcagtggtaatcatagaagtgtcttcggaactgggaccaaggtcaccgtcctag

SEQ ID NO: 9356 - DNA, 337 bp, Homo sapiens
gacatcgtgatgacccagtctccagactccctggctgtgtctctgggcgagagggccaccatcaactgcaagtccagccagagtgttttatacagctccaacaataagaactacttagcttggtaccaacagaaaccaggacaccctcctaagctgctcatttactgggcttctacccgggaatccggggtccctgaccgattcagtggcagcgggtctgggacagatttcactctcaccatcagcagcctgcaggctgaagatgtggcactttattactgtcagcaatattatagttcgtggacgttcggccaagggaccaaggtggaaatcaaac

SEQ ID NO: 9357 - DNA, 328 bp, Homo sapiens
gaaattgtgttgacgcagtctccagccaccctgtctttgtctccaggggaaagagccaccctctcctgcggggccagtcagactattaacaataactacttagcctggtaccagcagaaacctggcctggcgcccagactcctcatctatgatgcattcaacaggaccactggcatcccagacaggttcagtggcagtgggtctgagacagacttcactctcaccatcagcagactggagcctgaagatttagcagtctattactgtcagcactatgatacctcacccacgtggacgttcggccaagggaccagggtggaaatcaaac

SEQ ID NO: 9358 - DNA, 331 bp, Homo sapiens
cagtctgccctgactcagcctgcctccgtgtctgggtctcctggacagtcgatcaccatgtcctgcactggaaccagcagtgacgttggtggttatgactatgtctcctggtaccaacagcacccaggcaaagtgcccaaactcatgatttatgatgtcagtgatcggccctcaggggtttctaatcggttctctggctccaagtctggcaacacggcctccctgaccatctctgggctccaggctgaggacgaggctcattattactgcagctcatatacaagcatcagcactcaggtattcggcggagggaccaaggtgaccgtcctag

SEQ ID NO: 9359 - DNA, 334 bp, Homo sapiens
cagtctgccctgactcagcctgcctccgtgtctgggtctcctggacagtcgatcaccatctcctgcactggaagcagcaatgacgttggtggttatacctatgtctcctggtaccaacatcacccaggcaaagcccccaaactcatgatttatgatgtcaataatcggccctcaggggtttctaatcgcttctctggctccaagtctggcaacacggcctccctgaccatctctgggctccaggctgaggacgaggctgattattactgcagctcatatagaagtagtagcactctcgtggttttcggcggagggaccaagctgaccgtcctag

SEQ ID NO: 9360 - DNA, 322 bp, Homo sapiens
gacatccagttgacccagtctccatccttcctgtctgcatctgtaggagacagagtcaccatcacttgccgggccagtcagggcattagcagttatttagcctggtatcagcaaaaaccagggaaagcccctaagctcctgatctatgctgcatccactttgcaaagtggggtcccatcaaggttcagcggcagtggatctgggacagaattcactctcacaatcagcagcctgcagcctgaagattttgcaacttattactgtcaacagcttaatagttacccccctcccttcggccaagggacacgactggagattaaac

SEQ ID NO: 9361 - DNA, 322 bp, Homo sapiens
gaaattgtgttgacacagtctccagccaccctgtctttgtctccaggggaaggagccaccctctcctgcagggccagtcagagtatttacagctacttagcctggtaccaacagaaacctggccaggctcccaggctcctcatctatgatgcatccaacagggccactggcatcccagccaggttcagtggcagtgggtctgggacagacttcactctcaccatcagcagcctagagcctgaagattttgcagtttattactgtcagcagcgtagcaactggcctctgacgttcggccaagggaccaaggtggaaatcaaac

SEQ ID NO: 9362 - DNA, 322 bp, Homo sapiens; identical to SEQ ID NO: 1778

SEQ ID NO: 9363 - DNA, 322 bp, Homo sapiens
gacatccagatgacccagtctccttccaccctgtctgcatctgtaggagacagagtcaccatcacttgccgggccagtcagagtattagtacttggttggcctggtttcagcagaaaccagggaaagcccccaagctcctgatccacaaggcgtctgatttacaaagtggggtcccatcaaggttcagcggcagtggatctgggacagaattcattctcaccatcagcagcctgcagcctgatgattctgcaacttattattgccaacaatatagtagttattcgttcacttttggccaggggaccaagctggagatcaaac

SEQ ID NO: 9364 - DNA, 329 bp, Homo sapiens
cagtctgtgttgacgcagccgccctcaatatctgcggccccaggacagaaggtcaccctctcctgctctggaagcacctccaacattggacagaactctgtgtcctggtaccagcatgtccccggaacagcccccaaactcctcatctatgaaaatgataagcgaccctcagggatccctgaccgattctctggctccaagtctggcacgtctggcaccctgggcatcaccggactccagactggggacgaagccgattattactgcggaacatgggatagcaacctgaatattgtgcttttcggcggagggaccaagctgaccgtcct

SEQ ID NO: 9365 - DNA, 331 bp, Homo sapiens
cagtctgccctgactcagcctccctccgcgtccgggtctcctggacagtcagtcaccatctcctgcactggaaccagcagtgacgttggtggttataactatgtctcctggtaccaacagcacccaggcaaagcccccaaactcatcatttatgaggtcagtaagtggccctcaggggtccctgatcgcttctctggctccaagtctggcaacacggcctccctgaccgtctctgggctccaggctgaggatgaggctgattattactgcagctcatatgcaggcagcaacaattgggtgttcggcggagggaccaagctgaccgtcctag

SEQ ID NO: 9366 - DNA, 322 bp, Homo sapiens; identical to SEQ ID NO: 1668

SEQ ID NO: 9367 - DNA, 322 bp, Homo sapiens
gccatccggatgacccagtctccatcctcattctctgcatctacaggagacagagtcaccatcacttgtcgggcgagtcagggtattagcagttatttagcctggtatcagcaaaaaccagggaaagcccctaagctcctgatctatgctgcatccactttgcaaagtggggtcccatcaaggttcagcggcagtggatctgggacagatttcactctcaccatcagctgcctgcagtctgaagattttgcaacttattactgtcaacagtattatagttaccctcggactttcggcggagggaccaaggtggagatcaaac

SEQ ID NO: 9368 - DNA, 331 bp, Homo sapiens
cagtctgtgttgacgcagccgccctcagtgtctgcggccccaggacagaaggtcaccatctcctgctctggaagcagctccaatactggggataattttgtatcctggtaccagcagctcccaggaacagcccccaaactcctcatctatgaaaataatcaccgaccctcagggattcctgatcgattctctggctccaagtctggcacgtcagccaccctgggcatcaccggactccagactggggacgaggccgattattactgcggaacatgggatagcagcctgagtgcttgggtgttcggcggagggaccaagctgaccgtcctag

SEQ ID NO: 9369 - DNA, 319 bp, Homo sapiens; identical to SEQ ID NO: 1688

SEQ ID NO: 9370 - DNA, 319 bp, Homo sapiens; identical to SEQ ID NO: 1688

SEQ ID NO: 9371 - DNA, 322 bp, Homo sapiens
gacatccagatgacccagtctccatcctccctgtctgcatctgtaggagacagagtcaccatcacttgccgggcaagtcagagtattaacagctatttaaattggtatcagcagaaaccagggaaagcccctaagctcctgatctatgctgcatccagtttgcaaggtggggtcccgtcaaggttcagtggcagtgcatctgggacagatttcactctcagcatcagtagtctgcaacctgaagattttgcaacttactactgtcaacagagttacagtgccccccgcactttcggcggagggaccaaggtggagatcaaac

SEQ ID NO: 9372 - DNA, 322 bp, Homo sapiens; identical to SEQ ID NO: 7733

SEQ ID NO: 9373 - DNA, 334 bp, Homo sapiens; identical to SEQ ID NO: 9140

SEQ ID NO: 9374 - DNA, 334 bp, Homo sapiens
cagtctgtgctgacgcagccgccctcagtgtctggggccccagggcagagggtcaccatctcctgcactgggagcagctccaacatcggggcaggttatgatgtacactggtaccagcagcttccaggaacagcccccaaactcctcatctatggtaacagcaatcggccctcaggggtccctgaccgattctctggctccaagtctggcacctcagcctccctggccatcactgggctccaggctgaggatgaggctgattattactgccagtcctatgacagcagcctgagtggttgggtgttcggcggagggaccaagctgaccgtcctag

SEQ ID NO: 9375 - DNA, 326 bp, Homo sapiens
gaaattgtgttgacgcagtctccaggcaccctatctttgtctccaggggaaagagccaccctctcctgcagggccagtcagactattaacagcacttatttagccggctaccagtggaaacctggccaggctcccaggctcctcatctacggtgcacccagcagggtcactggcatcccagacaggttcagtggcagtgggtctgggacagacttccgtctcaccatcagcagactggagcctgaagatttcacagtatattattgtcagtagtacggtagctcacctccggacgttcggcccagggaccaaggtggaaatcaaac

SEQ ID NO: 9376 - DNA, 322 bp, Homo sapiens; identical to SEQ ID NO: 3953

SEQ ID NO: 9377 - DNA, 320 bp, Homo sapiens
gacatccagatgacccagtctccatcctccctgtctgcatctgtaggagacagagtcaccatcacttgccaggcgagtcaggacattagcaactatttaaattggtatcagcagaaaccagggaaagcccctaagctcctgatctacgatgcatccaatttggaaacaggggtcccatcaaggttcagtggaagtggatctgggacagattttactttcaccatcagcagcctgcagcctgaagatattgcaacatattactgtcaacagtatgataatctccctcactttcggcggagggaccaaggtggagatcaaac

SEQ ID NO: 9378 - DNA, 322 bp, Homo sapiens
gccatccggatgacccagtctccatcctcattctctgcatctacaggagacagagtcaccatcacttgtcgggcgagtcagggtattagcagttatttagcctggtatcagcaaaaaccagggaaagcccctaagctcctgatctatgctgcatccactttgcaaagtggggtcccatcaaggttcagcggcagtggatctgggacagatttcactctcaccatcagctgcctgcagtctgaagattttgcaacttattactgtcaacagtattatagttaccctaggacgttcggccaagggaccaaggtggaaatcaaac

SEQ ID NO: 9379 - DNA, 322 bp, Homo sapiens; identical to SEQ ID NO: 3452

SEQ ID NO: 9380 - DNA, 325 bp, Homo sapiens; identical to SEQ ID NO: 872

SEQ ID NO: 9381 - DNA, 325 bp, Homo sapiens; identical to SEQ ID NO: 1686

SEQ ID NO: 9382 - DNA, 322 bp, Homo sapiens; identical to SEQ ID NO: 1520

SEQ ID NO: 9383 - DNA, 325 bp, Homo sapiens
gaaattgtgttgacgcagtctccaggcaccctgtctttgtctccaggggaaagagccaccctctcctgcagggccagtcagagtgttagcagcagctacttagcctggtaccagcagaaagctggccaggctcccaggctcctcatctatggtgcatccagcagggccactggcatcccagacaggttcagtggcagtgggtctgggacagacttcactctcaccatcagcagactggagcctgaagattttgcagtgtattactgtcagcagtatggtagctcacttatcaccttcggccaagggacacgactggagattaaac

SEQ ID NO: 9384 - DNA, 322 bp, Homo sapiens
gacatccagatgacccagtctccttccaccctgtctgcatctgtaggagacagagtcaccatcacttgccgggccagtcagagtattagtagctggttggcctggtatcagcagaaaccagggaaagcccctaagctcctgatctataaggcgtctagtttagaaagtggggtcccatcaaggttcagcggcagtggatctgggacagaattcactctcaccatcagcagcctgcagcctgatgattttgcaacttattactgccaacagtataatagttattctaacacttttggccaggggaccaagctggagatcaaac

SEQ ID NO: 9385 - DNA, 322 bp, Homo sapiens; identical to SEQ ID NO: 1520

SEQ ID NO: 9386 - DNA, 334 bp, Homo sapiens
gatattgtgatgacccagactccactctcctcacctgtcacccttggacagccggcctccatctcctgcaggtctagtcaaagcctcgtacacagtgatggaaacacctacttgagttggcttcagcagaggccaggccagcctccaagactcctaatttataagatttctaaccggttctctggggtcccagacagattcagtggcagtggggcagggacagatttcacactgaaaatcagcagggtggaagctgaggatgtcggggtttattactgcatgcaagctacacaagggatcaccttcggccaagggacacgactggagattaaac

SEQ ID NO: 9387 - DNA, 333 bp, Homo sapiens
cagtctgtgctgactcagccaccctcagcgtctgggacccccgggcagagggtcaccatctcttgttctggaagcagctccaacatcggaagtaattatgtatactggtaccagcagctcccaggaacggcccccaaactcctcatctatagtaataatcagcggccctcaggggtccctgaccgattctctggctccaagtctggcacctcagcctccctggccatcagtgggctccggtccgaggatgaggctgattattactgtgcagcatgggatgacagcctgagtggtcttgggtgttcggcggagggaccaagctgaccgtcctag

SEQ ID NO: 9388 - DNA, 331 bp, Homo sapiens
cagtctgccctgactcagcctccctccgcgtccgggtctcctggacagtcagtcaccatctcctgcactggaaccagcagtgacgttggtggttatgactatgtctcctggtaccaacaccacccaggcaaagcccccaaactcatgatttatgaggtcactaagcggccctcaggggtccctgatcgcttctctggctccaagtctggcaacacggcctccctgaccgtctctggcctccaggctgaggatgaggctgattattactgcagctcatatgcaggcagcaacaatttagtcttcggaactgggaccaaggtcaccgtcctag

SEQ ID NO: 9389 - DNA, 331 bp, Homo sapiens
cagtctgccctgactcagcctgcctccgtgtctggatctcctggacagtcgatcaccatctcctgcactggaaccagcagtgatgttgggagttataaccttgtctcctggtaccaacagcacccaggcaaagcccccaaactcatgatttatgagggcagtaagcggccctcagggatttctaatcgcttctctggctccaagtctggcaacacggcctccctgacaatctctgggctccaggctgaggacaaggctgattatttctgcttctcatatgcaggtagtaccacttgggtgttcggcggagggaccaagctgaccgtcctag

SEQ ID NO: 9390 - DNA, 325 bp, Homo sapiens
gacatccagatgacccagtctccatcctccctgtctgcatctgtaggagacagagtcaccatcacttgccgggcaagtcagagcattagcagctatttaaattggtatcaggagaaaccagggaaagcccctaacctcctgatctatgctgcatccactttgcaaagtggggtcccatcaaggttcagtggcagtggatctgggacagatttcactctcaccatcagcagtctgcaacctgaagattctgcaacttactactgtcaacagagttacagtacccctcggagcactttcggcggagggaccaaggtggagatcaaac

SEQ ID NO: 9391 - DNA, 325 bp, Homo sapiens; identical to SEQ ID NO: 5319

SEQ ID NO: 9392 - DNA, 322 bp, Homo sapiens
gacatccagatgacccagtctccttccaccctgtctgcatctgtaggagacagagtcaccatcacttgccgggccagtcagagtattagtagctggttggcctggtatcagcagaaaccagggaaagcccctaagctcctgatctataaggcgtctagtttagaaagtggggtcccatcaaggttcagcggcagtggatctgggacagaattcactctcaccatcagcagcctgcagcctgatgattttgcaacttattactgccaacagtataatagttattctcggacgttcggccaagggaccaaggtggaaatcaaac

SEQ ID NO: 9393 - DNA, 325 bp, Homo sapiens
tcttctgagctgactcaggaccctgctgtgtctgtggccttgggacagacagtcaggatcacatgccaaggagacagcctcagaagctattatgcaagctggtaccagcagaagccaggacaggcccctgtacttgtcatctatggtaaaaacaaccggccctcagggatcccagaccgattctctggctccagctcaggaaacacagcttccttgaccatcactggggctcaggcggaagatgaggctgactattactgtaactcccgggacagcagtggtaacccttatgtcttcggaactgggaccaaggtcaccgtcctag

SEQ ID NO: 9394 - DNA, 325 bp, Homo sapiens
gacatccagatgacccagtctccatcctccctgtctgcatctgtaggagacagagtcaccatcacttgccgggcaagtcagagcattagcagctatttaaattggtatcagcagaaaccagggaaagcccctaagctcctgatctatgctgcatccagtttgcaaagtggggtcccatcaaggttcagtggcagtggatctgggacagatttcactctcaccatcagcagtctgcaacctgaagattttgcaacttactactgtcaacagagttacagtaccccttcgtggacgttcggccaagggaccaaggtggaaatcaaac

SEQ ID NO: 9395 - DNA, 325 bp, Homo sapiens
gaaattgtgttgacgcagtctccaggcaccctgtctttgtctccaggggaaagagccaccctctcctgcagggccagtcagagtgttagcagcagctacttagcctggtaccagcagaaacctggccaggctcccaggctcctcatctatggtgcatccagcagggccactggcatcccagacaggttcagtggcagtgggtctgggacagacttcactctcaccatcagcagactggagcctgaagattttgcagtgtattactgtcagcagtatggtagctcaccgcggacgttcggccaagggaccaaggtggaaatcaaac

SEQ ID NO: 9396 - DNA, 325 bp, Homo sapiens; identical to SEQ ID NO: 2568

SEQ ID NO: 9397 - DNA, 330 bp, Homo sapiens
cagtctgccctgactcagcctgcctccgtgtctgggtctcctggacagtcgatcaccgtctcctgccctggaaccagcagtgacgttggtgattataagtttgtctcctggtaccaacaacacccaggcaaagcccccaaactcgtgatttatgatgtcagtaatcggccctcaggggtttctaatcgcttctctggctccaagtctggcaacacggcctccctgaccacctctgggctccaggctgaggacgaggctgattattactgcagctcatatacaagcagcagcacttatgtcttcggaattgggaccaaggtcaccgtccta

SEQ ID NO: 9398 - DNA, 331 bp, Homo sapiens
cagtctgccctgactcagcctgcctccgtgtctgggtctcctggacagtcgatcaccatctcctgcactggaaccagcagtgatgttgggagttataaccttgtctcctggtaccaacagcacccaggcaaagcccccaaactcatgatttatgagggcagtaagcggccctcaggggtttctaatcgcttctctggctccaagtctggcaacacggcctccctgacaatctctgggctccaggctgaggacgaggctgattattactgctgctcatatgcaggtagtagcacctatgtcttcggaactgggaccaaggtcaccgtcctag

SEQ ID NO: 9399 - DNA, 322 bp, Homo sapiens; identical to SEQ ID NO: 1798

SEQ ID NO: 9400 - DNA, 322 bp, Homo sapiens
gacatccagatgacccagtctccatcctccctgtctgcatctgtaggagacagagtcaccatcacttgccgggcaagtcagagcattagcagctatttaaattggtatcagcagaaaccagggaaagcccctaagctcctgatctatgctgcatccagtttgcaaagtggggtcccatcaaggttcagtggcagtggatctgggacagatttcactctcaccatcagcagtctgcaacctgaagattttgcaacttactactgtcaacagagttacagtaccccggggacgttcggccaagggaccaaggtggaaatcaaac

SEQ ID NO: 9401 - DNA, 337 bp, Homo sapiens
cagtctgtgttgacgcagccgccctcagtgtctgcggccccaggacagaaggtcaccatctcctgctctggaggcagctccaacattggaaattattatgtatcgtggtaccagcagctcccaggaacagcccccaaactcctcatttatgacaataataagcgaccctcagggattcctgaccgattctctggctccaagtctggcacgtcagccaccctgggcatcaccggactccagactggggacgaggccgattattactgcggaacatgggagagcagcctgaatactggggattgggtgttcggcggagggaccaagctgaccgtcctag

SEQ ID NO: 9402 - DNA, 322 bp, Homo sapiens
gacatccagatgacccagtctccatccgccctgtctgcatctgtaggagacagagtcaccatcacttgccgggcaagtcagagcattagcagctatttaaattggtatcagcagaaaccagggaaagcccctaagctcctgatctatgctgcatccagtttgcaaagtggggtcccatcaaggttcagtggcagtggatctgggacagatttcactctcaccatcagcagtctgcaacctgaagattttgcaacttactactgtcaacagggttacggtagtccattcactttcggccctgggaccaaagtggatatcaaac

SEQ ID NO: 9403 - DNA, 319 bp, Homo sapiens
tcctatgagctgactcagccaccctcagtgtccgtgtccccaggacagacagccagcatcacctgctctggagataaattgggggataaatatgcttgttggtatcagcagaagccaggccagtcccctgtgctggtcatctatcaagatagcaggcggcccccagggatccctgagcgattctctggctccaactccgggaacacagccactctgaccatcagcgggacccaggctatggatgaggctgactatcactgtcaggcgtgggacagcagtaatgtggtatttggcggagggaccaagctgaccgtcctag

SEQ ID NO: 9404 - DNA, 322 bp, Homo sapiens
gacatccagatgacccagtctccatcctccctgtctgcatctgtaggagacagagtcaccatcacttgccgggcaagtcagagcattagcggctatttaaattggtatcaacagaaaccagggaaagcccctaagctcctgatctatgctgcatccagtttgcaaagtggggccccatcaaggttcagtggcagtggatctgggacagatttcactctcaccatcagcagtctgcaacctgaagattttgcaacttactactgtcaacagagttacagtacccctctcactttcggccctgggaccaaagtggatatcaaac

SEQ ID NO: 9405 - DNA, 322 bp, Homo sapiens
gacatccagatgacccagtctccatcctccctgtctgcatctgtaggagacagagtcaccatcacttgccgggcaagtcagagcattagcagctatttaaattggtatcagcagaaaccagggaaagcccctaagctcctgatctatgctgcatccagtttgcaaagtggggtcccatcaaggttcagtggcagtggatctgggacagatttcactctcaccatcagcagtctgcaacctgaagattttgcaacttactactgtcaacagagttacagtaccccttggacgttcggccaagggaccaaggtggaaatcaaac

SEQ ID NO: 9406 - DNA, 328 bp, Homo sapiens
cagtctgccctgactcagcctcgctcagtgtccgggtctcctggacagtcagtcaccatctcctgcactggaaccagcagtgatgttggtggttataactatgtctcctggtaccaacagcacccaggcaaagcccccaaactcatgatttatgatgtcagtaagcggccctcaggggtccctgatcgcttctctggctccaagtctggcaacacggcctccctgaccatctctgggctccaggctgaggatgaggctgattattactgctgctcatatgcaggcagctcttgggtgttcggcggagggaccaagctgaccgtcctag

SEQ ID NO: 9407 - DNA, 322 bp, Homo sapiens
gaaattgtgttgacgcagtctccaggcaccctgtctttgtctccaggggaaagagccaccctctcctgcagggccagtcagagtgttagcagcagctacttagcctggtaccagcagaaacctggccaggctcccaggctcctcatctatggtgcatccagcagggccactggcatcccagacaggttcagtggcagtgggtctgggacagacttcactctcaccatcagcagactggagcctgaagattttgcagtgtattactgtcagcagtatggtagcacgctcactttcggcggagggaccaaggtggagatcaaac

SEQ ID NO: 9408 - DNA, 325 bp, Homo sapiens
gaaattgtgttgacgcagtctccaggcaccctgtctttgtctccaggggaaagagccaccctctcctgcagggccagtcagagtgttagcagcagctacttagcctggtaccagcagaaacctggccaggctcccaggctcctcatctatggtgcatccagcagggccactggcatcccagacaggttcagtggcagtgggtctgggacagacttcactctcaccatcagcagactggagcctgaagattttgcagtgtattactgtcagcagtatggtagctcaccaggcactttcggcggagggaccaaggtggagatcaaac

SEQ ID NO: 9409 - DNA, 313 bp, Homo sapiens
tcctatgagctgactcagccaccctcagtgtccgtgtccccaggacagacagtcagcatcacctgctctggagataaattgggggataaatatgtttgctggtatcagcagaagccaggccagtcccctgtgctggttatgtatcaaaattacaagcggccctcagggatccctgagcgattctctggctccaactctgggaacacagccactctgaccatcagcgggacccaggctatggatgaggctgactattactgtcaggcgtggaacagcaggatattcggcggagggaccaagctgaccgtcctag

SEQ ID NO: 9410 - DNA, 325 bp, Homo sapiens; identical to SEQ ID NO: 1686

SEQ ID NO: 9411 - DNA, 319 bp, Homo sapiens
tcctatgagctgactcagccaccctcagtgtccgtgtccccaggacagacagccagcatcacctgctctggagataaattggggaataaatatgcttgctggtatcagcagaagccaggccagtcccctgtactggtcatctatgaagataacaagcggccctcagggatccctgagcgattctctggctccaactctgggaacacagccactctgaccatcagcgggacccaggctttggatgaggctgactattactgtgaggcgtgggacagcagcactgtggtcttcggcggagggaccaagctgaccgtcctag

SEQ ID NO: 9412 - DNA, 322 bp, Homo sapiens
tcctatgagttgacacagccaccctcggtgtcagtgtctccaggacaaacggccaggatcacctgctctggagatgcattgccaaaaaaatatgcttattggtaccagcagaagtcaggccaggcccctgtgctggtcatctatgaggacagcaaacgaccctccgggatccctgagagattctctggctccagttcagggacaatggccaccttgactatcagtggggcccaggtggaggatgaagctgactactactgttactcaatagacagcagtggtaatcaggtattcggcggagggaccaaggtgaccgtcctag

SEQ ID NO: 9413 - DNA, 331 bp, Homo sapiens; identical to SEQ ID NO: 9342

SEQ ID NO: 9414 - DNA, 322 bp, Homo sapiens
gaaattgtgttgacacagtctccagccaccctgtctttgtctccaggggaaagagccaccctctcctgcagggccagtcacagtgttagcagctacttagcctggtaccaacagaaacctggccaggctcccaggctcctcatctatgatgcatccaacagggccactggcatcccagccaggttcagtggcagtgggtctgggacagacttcactctcaccatcagcagcctagagcctgaagattttgcagtttattactgtcagcagcgtagcaactggccgtgcagttttggccaggggaccaagctggagatcaaac

SEQ ID NO: 9415 - DNA, 322 bp, Homo sapiens
gaaattgtgttgacacagtctccagccaccctgtctttgtctccaggggaaagagccaccctctcctgcagggccagtcagagtgttagcagctacttagcctggtaccaacagaaacctggccaggctcccaggctcctcatctatgatgcatccaacagggccactggcatcccagccaggttcagtggcagtgggtctgggacagacttcactctcaccatcagcagcctagagcctgaagattttgcagtttattactgtcagcagcgtagcaactggcctccggccttcggccaagggacacgactggagattaaac

SEQ ID NO: 9416 - DNA, 328 bp, Homo sapiens
gaaattgtgttgacacagtctccagccaccctgtctttgtctccaggggaaagagccaccctctcctgcagggccagtcagagtgttagcagctacttagcctggtaccaacagaaacctggccaggctcccaggctcctcatctatgatgcatccaacagggccactggcatcccagccaggttcagtggcagtgggtctgggacagacttcactctcaccatcagcagcctagagcctgaagattttgcagtttattactgtcagcagcgtagcaactggcctccccttatcactttcggccctgggaccaaagtggatatcaaac

SEQ ID NO: 9417 - DNA, 325 bp, Homo sapiens
gaaattgtgttgacgcagtctccaggcaccctgtctttgtctccaggggaaagagccaccctctcctgcagggccagtcagagtgttagcagcagctacttagcctggtaccagcagaagcctggccaggctcccaggctcctcatctatggtgcatccagcagggccactggcatcccagacaggttcagtggcagtgggtctgggacagacttcactctcaccatcagcagactggagcctgaagattttgcagtgtattactgtcagcagtatggtagctcaccgtacacttttggccaggggaccaagctggacatcaaac

SEQ ID NO: 9418 - DNA, 317 bp, Homo sapiens
cctttgacctgactcagccaccctcattgtccgtgtccccaggacagacagccagcatcacctgctctggagacaaattgggggataaatatactgcctggtatcagcagaagccaggccagtctcctgtgctggtcatctatcaagacactaagcgtccctcagggatccctgaccgcttcactggctccaactctgggaacacagccactctgaccatcagcgcgacccaggccatggatgaggctgactattactgtcaggcgtgggacagctacacttatgtcttcggaactgggaccaaggtctccgtccta

SEQ ID NO: 9419 - DNA, 331 bp, Homo sapiens
cagtctgccctgactcagcctccctccgcgtccgggtctcctggacagtcagtcaccatctcctgcactgggaccagcagtgacgttggtggttataactatgtctcctggtaccaacagcacccaggcaaagcccccaaactcatgatttatgaggtcagtaagcggccctcaggggtccctgatcgcttctctggctccaagtctggcaacacggcctccctgaccgtctctgggctccaggctgaggatgaggctgatttttactgcagctcatatgcaggcagcaacacttggatgttcggcggcgggaccaagctgaccgtcctag

SEQ ID NO: 9420 - DNA, 337 bp, Homo sapiens
cagtctgtgctgacgcagccgccctcagtgtctggggccccagggcagagggtcaccatctcctgcactgggagcagttccaacatcggggcaggttttgatgtacactggtaccagcagcttccaggaacagcccccaaactcctcatctatggtaacggcaatcggccctcaggggtccctgaccgattctctggctccaagtctggcacctcagcctccctggccatcactgggctccaggctgaggatgaggctgtttattactgccagtcctatgacaacagcctgactggttcgagggtcttcggaactgggaccaaggtcaccgtcctag

SEQ ID NO: 9421 - DNA, 315 bp, Homo sapiens
gacatccagatgacccagtctccatcctccctgtctgcatctgtaggagacagagtcaccatcacttgccaggcgagtcaggacattagcaactatttaaattggtatcagcagaaaccagggaaagcccctaagctcctgatctacgatgcatccaatttggaaacaggggtcccatcaaggttcagtggaagtggatctgggacagattttactttcaccatcagcagcctgcagcctgaagatattgcaacatattactgtcaacagtatgataatcccttttcggccctgggaccaaagtggatatcaaac

SEQ ID NO: 9422 - DNA, 340 bp, Homo sapiens
cagtctgtgctgacgcagccgccctcagtgtctggggccccagggcagagggtcaccatctcctgcactgggagcagctccaacatcggggcaggttatgatgtacactggtaccagcagcttccaggaacagcccccaaactcctcatctatggtaacagcaatcggccctcaggggtccctgaccgattctctggctccaagtctggcacctcagcctccctggccatcagtgggctccaggctgaggatgaggctgattattactgccagtcctatgacagcagcctgagtggttccaattatgtcttcggaactgggaccaaggtcaccgtcctag

SEQ ID NO: 9423 - DNA, 322 bp, Homo sapiens; identical to SEQ ID NO: 3870

SEQ ID NO: 9424 - DNA, 331 bp, Homo sapiens
cagcttgtgctgactcaatcgccctctgcctctgcctccctgggagcctcggtcaaactcacctgcactctgagcagtgggcacagcagctacgccatcgcatggtatcagcagcagccagagaagggccctcggtacttgatgaagcttaacagtgatggcagccacagcaagggggacgggatccctgatcgcttctcaggctccagttctggggctgagcgctacctcaccatctccagcctccagtctgaggatgaggctgactattactgtcagacctggggcactggcattttattcggcggagggaccaagctgaccgtcctag

SEQ ID NO: 9425 - DNA, 322 bp, Homo sapiens; identical to SEQ ID NO: 837

SEQ ID NO: 9426 - DNA, 322 bp, Homo sapiens
gacatccagttgacccagtctccatccttcctgtctgcatctgtaggagacagagtcaccatcacttgctgggccagtcagggcattagcagttatttagcctggtatcagcaaaaaccagggaaagcccctaagctcctgatctatgctgcattcaccttgcaaagtggggtcccatcaaggttcagcggcagtggatctgggacagaattcactctcacaatcagcagcctgcagcctgaagattttgcaacttattactgtcaacagcttaatagttacccgctcactttcggcggagggaccaaggtggagatcaaac

SEQ ID NO: 9427 - DNA, 322 bp, Homo sapiens
gacatccagatgacccagtctccatcctcactgtctgcatctgtaggagacagagtcaccatcacttgtcgggcgagtcagggcattaccaattatttagcctggtttcagcagaaaccagggaaagcccctaagtccctgatctatgctgcatccagtttgcaaagtggggtcccatcaaagttcagcggcagtggatctgggacagatttcactctcaccatcagcagcctgcagcctgaagattttgcaacttattactgccaacagtacaatagtttccctctcaccttcggccaagggacacgactggagattaaac

SEQ ID NO: 9428 - DNA, 331 bp, Homo sapiens
cagtctgtgttgacgcagccgccctcagtgtctgcggccccaggacagaaggtcaccatctcctgctctggaagcagctccaatattgggaataattatgtatcctggtaccagcagctcccaggaacagcccccagactcctcatctatgaaaataataagcgaccctcagggattcctgaccgattctctggctccaagtctggcacgtcagccaccctgggcatcaccggactccagactggggacgaggccgattattactgcggaacatgggatagcagcctgagtgtttatgtcttcggaactgggaccaaggtcaccgtcctag

SEQ ID NO: 9429 - DNA, 331 bp, Homo sapiens
cagtctgccctgactcagcctccctccgcgtccgggtctcctggacagtcagtcaccatctcctgcactggaaccagcagtgacgttggtggttataactatgtctcctggtaccagcaacacccaggcaaagcccccaaactcatgatttatgacgtcagtaggcggccctcaggggtccctgatcgcttctctggctccaagtctggcaacacggcctccctgaccgtctctgggctccaggctgaggatgaggctgattattactgcagttcatatgcaggcagcaacctccatgtcctcggaactgggaccaaggtcaccgtcctag

SEQ ID NO: 9430 - DNA, 322 bp, Homo sapiens
gaaattgtgttgacgcagtctccaggcaccctgtctttgtctccaggggaaagagccaccctctcctgcagggccagtcagagtgttagcaacaactacttagcctggtaccagcagaaacctggccaggctcccaggctcctcatctatggtgcatccagcagggccactggcatcccagacaggttcagtggcagtgggtctgggacagacttcactctcaccatcagcagactggagcctgaagattttgcagtgtattactgtcagcagtatggtagctcgtggacgttcggccaagggaccaaggtggaaatcaaac

SEQ ID NO: 9431 - DNA, 331 bp, Homo sapiens
cagtctgtgctgactcagccaccctcagcgtctgggacccccggacagagggtcaccatctcttgttctggaagcagctccaacatcggaagtaatactgcaaactggtaccagcagctcccaggaacggcccccaaagtcctcatctatagtagtaatcagcggccctcaggggtccctgaccgattctctggctccaagtctggcacctcagcctccctggccatcagtgggctccagtctgacgatgaggctgattattactgtgcggcatgggatgacagactgaatgggtatgtcttcggaactgggaccaaggtcaccgtcctag

SEQ ID NO: 9432 - DNA, 322 bp, Homo sapiens
gccatccggatgacccagtctccatcctcattctctgcatctacaggagacagagtcaccatcacttgtcgggcgagtcagggtattagcagttatttagcctggtatcagcaaaaaccagggaaagcccctaagctcctgatctatgctgcatccactttgcaaagtggggtcccatcaaggttcagcggcagtggatctgggacagatttcactctcaccatcagctgcctgcagtctgaagattttgcaacttattactgtcaacagtattatagttacccattcactttcggccctgggaccaaagtggatatcaaac

SEQ ID NO: 9433 - DNA, 322 bp, Homo sapiens; identical to SEQ ID NO: 3350

SEQ ID NO: 9434 - DNA, 322 bp, Homo sapiens
gaaattgtgctgactcagtctccagactttcagtctggagctccaaaggagaaagtcaccatcacgtgccgggccagtcagagcattggtagtagcttacactggtaccagcagaaaccagagcagtctccaaagctcctcatcaagtttgcttcccagtccatctcaggggtcccctcgagattcagtggcagtggatctgggacagatttcaccctcaccatcaatggcctggagcctgaagatgttgcagtgtattactgtcatcagagtagaagtttaccgctcaccttcggcggggggaccaaggtgcagatcaaac

SEQ ID NO: 9435 - DNA, 328 bp, Homo sapiens
cagtctgtgttgacgcagccgccctcagtgtctgcggccccaggacagaaggtcaccatctcctgctctggaagaagctccaacattgggaataattatgtattttggtaccagcaactcccaggaacagcccccaaagtcctcatctatgaaagtaataagcgaccctcagggattcctgaccgattctctggctccaagtctggcacgtctgccaccctgggcatcaccggactccagactggggacgaggccgattattactgcggaacatgggatagcagcctgagtgcttatgtgttcggagctgggaccaaggtcaccgtcc

SEQ ID NO: 9436 - DNA, 325 bp, Homo sapiens
gaaattgtgttgacgcagtctccaggcaccctgtctttgtctccaggggagagagccaccctctcctgtagggccagtcagagtgttagcagcacctacttagcctggtatcagcagaaacctggccaggctcccaggctcctcatttatggtgcatccataagggccactggcatcccagacaggttcagtggcagtgggtctgggacagacttcactctcaccatcagcagactggaacctgaagattttgcagtgtatttctgtcagcagtatggtgggtctttgctcactttcggcggagggaccaaggtggagatgaaac

SEQ ID NO: 9437 - DNA, 332 bp, Homo sapiens
ttttttgctgacccagccccactctgtgtcggagtctccggggaagacggtaaccatctcctgcaccggcagcaatggcagcattgccactaagtatgtgcagtggtaccagctgcgcccgggcagtgcccccataactttaatctttgaggacagccgaagaccctctggggtccctggtcggttctctggctccaccgacacgtcctccaactctgcctccctcaccatctctggactgaagactgaggacgaggctgactactactgtcagtcttatgatgctgataatcatgtggtgttcggcggagggaccaagctgaccgtcctag

SEQ ID NO: 9438 - DNA, 325 bp, Homo sapiens; identical to SEQ ID NO: 7982

SEQ ID NO: 9439 - DNA, 331 bp, Homo sapiens
cagtctgccctgactcagcctgcctccgtgtctgggtctcctggacagtcgatcaccatctcctgcactggaaccagcagtgacgttggtggttataactatgtctcctggtaccaacagcacccaggcaaagcccccaaactcatgatttatgatgtcagtaatcggccctcaggggtttctaatcgcttctctggctccaagtctggcaacacggcctccctgaccatctctgggctccaggctgaggacgaggctgattattactgcagctcatatacaagcagcagcacttgggtgttcggcggagggaccaagctgaccgtcctag

SEQ ID NO: 9440 - DNA, 325 bp, Homo sapiens
tcctatgagctgacacagccaccctcggtgtcagtgtccccaggacaaacggccaggatcacctgctctggagatgcattgccaaaaaaatatgcttattggtaccagcagaagtcaggccaggcccctgtgctggtcatctatgaggacaataaacgaccctccgggatccctgagagattctctggctccagctcagggacaatggccaccttgactatcagtggggcccaggtggaggatgaagctgactactactgttactcaacagacagcagtggtaatcgttgggtgttcggcggagggaccaagctgaccgtcctag

SEQ ID NO: 9441 - DNA, 340 bp, Homo sapiens
gacatcgtgatgacccagtctccagactccctggctgtgtctctgggcgagagggccaccatcagctgcaagtccagccagaatgttttatacagctccaacaataagaactacttaggttggtaccagcagaaaccaggacagcctcctaaactgctcatttcctgggcatctacccgggaatccggggtccctgaccgattcagtggcagcgggtctgggacagatttcactctcaccatcagcagcctgcaggctgaagatgtggcagtttattactgtcagcaatattatagtactcctcccaccttcggccaagggacacgactggagattaaac

SEQ ID NO: 9442 - DNA, 325 bp, Homo sapiens
gccatccggatgacccagtctccatcctcattctctgcatctacaggagacagagtcaccatcacttgtcgggcgagtcagggtattagcagttatttagcctggtatcagcaaaaaccagggaaagcccctaagctcctgatctatgctgcatccactttgcaaagtggggtcccatcaaggttcagcggcagtggatctgggacagatttcactctcaccatcagctgcctgcagtctgaagattttgcaacttattactgtcaacagtattatagttaccctccgatcaccttcggccaagggacacgactggagattaaac

SEQ ID NO: 9443 - DNA, 334 bp, Homo sapiens
gatattgtgatgactcagtctccactctccctgatcgtcacccctggagagccggcctccatctcctgcaggtctagtcagagcctcttgtatagtaatggatacaactatttggattggtacctgcagaagccagggcagtctccacagctcctgatctatttgggttctaatcgggcctccggggtccctgacaggttcagtgccagtggatcaggcacagattttacactgaaaatcagcagagtggaggctgaggatgttgggatttattactgcatgcaagctctacaaagtcggacgttcggccaagggaccaaggtggaaatcaaac

SEQ ID NO: 9444 - DNA, 322 bp, Homo sapiens; identical to SEQ ID NO: 6078

SEQ ID NO: 9445 - DNA, 322 bp, Homo sapiens
gacatccagatgacccagtctccatcctccctgtctgcatctgtaggagacagagtcaccatcacttgccgggcgagtcagggcattagcaattatttagcctggtatcagcagaaaccagggaaagttcctaagctcctgatctatgctgcatccactttgcaatcaggggtcccatctcggttcagtggcagtggatctgggacagatttcactctcaccatcagcagcctgcagcctgaagatgttgcaacttattactgtcaaaagtataacagtgcccctagaacgttcggccaagggaccaaggtggaaatcaaac

SEQ ID NO: 9446 - DNA, 322 bp, Homo sapiens
gacatccagatgacccagtctccatcctcactgtctgcatctgtaggagacagagtcaccatcacttgtcgggcgagtcagggcattagcaattttttagcctggtttcagcagaagccagggaaagcccctaagtccctgatctatgctgcatccagtttgcaaagtggggtcccatcaaagttcagcggcagtggatctgggacagatttcactctcaccatcagcagcctgcagcctgaagatgctgcaacttattactgccatcagtataataactaccctctcactttcggcggagggaccaagttggagatcaaac

SEQ ID NO: 9447 - DNA, 318 bp, Homo sapiens
gacatccagttgacccagtctccatccttcctgtctgcatctgtaggagacagagtcaccatcacttgccgggccagtcagggcattagcagttatttagcctggtatcagcaaaaaccagggaaagcccctaagctcctgatctatgctgcatccactttgcaaagtggggtcccatcaaggttcagcggcagtggatctgggacagaattcactctcacaatcagcagcctgcagcctgaagattttgcaacttattactgtcaacagcttaatagtcattcactttcggccctgggaccaaagtggatatcaaac

SEQ ID NO: 9448 - DNA, 331 bp, Homo sapiens
cagtctgccctgactcagcctccctccgcgtccgggtctcctggacagtcagtcaccatctcctgcgctggaaccagcagtgacgttggtggttataactatgtctcctggtaccaacagcacccaggcaaagcccccaaactcatgatttatgacgtcagtaagcggccctcaggggtccctgatcgcttctctgcctccaagtctggcaacacggcctccctgaccgtctctgggctccaggctgaggatgaggctgattattactgcagctcatatgcaggcagcaacaattatgtcttcggaactgggaccaaggtcaccgtcctag

SEQ ID NO: 9449 - DNA, 331 bp, Homo sapiens
cagtctgccctgactcagcctgcctccgtgtctgggtctcctggacagtcgatcaccatctcctgcactggaaccagcagtgatcttgggagttataaccttgtctcctggtaccaacagcacccaggcaaagcccccaaactcatgatttatgagggcagtaagcggccctcaggggtttctaatcgcttttctggctccaagtctggcaacacggcctccctgacaatctctgggctccaggctgaggacgaggctgattattactgctgctcatatgcaggtagtagcacttgggtcttcggaactgggaccaaggtcaccgtcctag

SEQ ID NO: 9450 - DNA, 340 bp, Homo sapiens
gacatcgtgatgacccagtctccagactccctggctgtgtctctgggcgagagggccaccatcgactgcaagtccagtcagagtgttttatatagctccaacaaaaagaactacttagcttggtaccagcaaaaaccaggacagcctcctaagctgctcatttactgggcatctacccgggaatacggggtccctgaccgattcagtggcagcgggtctgggacagatttcactctcaccatcagcactctgcaggctgaagatgtggcagtttattattgtcagcaatattatagtattccgctcactttcggcggagggaccaaggtggggatcaaac

SEQ ID NO: 9451 - DNA, 334 bp, Homo sapiens
caggcagggctgactcagccaccctcggtgtccaagggcttgagacagaccgccacactcacctgcactgggaacagcaacattgttggcaaccaaggagcagcttggctgcagcagcaccagggccaccctcccaaactcctatcctacaggaataacaaccggccctcagggatctcagagagattctctgcatccaggtcaggaaacacagcctccctgaccattactggactccagcctgaggacgaggctgactattactgctcagcattggacagcagcctcagtgctcccttggtgttcggcggagggaccaagctgaccgtcctag

SEQ ID NO: 9452 - DNA, 325 bp, Homo sapiens
tcctatgagctgacacagccaccctcggtgtcagtgtccccaggacagacggccaggatctcctgctctggagatgcattgccaaagcaatatgcttattggtaccagcagaagccaggccaggcccctgtgctggtgatatataaagacagtgagagggcctcagggatccctgagcgattctctggctccagctcagggacaacagtcacgttgaccatcagtggagtccaggcagaagacgaggctgactattactgtcaatcaccagacagcagtagtacttatgtgctattcggcggagggaccaagctgaccgtcctag

SEQ ID NO: 9453 - DNA, 334 bp, Homo sapiens
cagtctgccctgactcagcctcgctcagtgtccgggtctcctggacagtcagtcaccatctcctgcactggaaccagcagtgatgttggtggttataactatgtctcctggtaccaacagcacccaggcaaagcccccaaactcatgatttatggtgtcagtaggcggccctcaggggtccctgatcgcttctctggctccaagtctggcaacacggcctccctgaccatctctgggctccagactgaagatgaggccgattattactgctgctcatatgcagggaggtacactttcgtggtattcggcggagggaccaagctgaccgtcctag

SEQ ID NO: 9454 - DNA, 319 bp, Homo sapiens
gacatccagatgacccagtctccatcctccctgtctgcatctgtaggagacagagtcaccatcacttgccgggcaagtcagggcattagaaatgatttaggctggtatcagcagaaaccagggaaagcccctaagcgcctgatctatactgcatccagtttgcaaagtggggtcccatcaaggttcagcggcagtggatctgggacagaattcactctcacaatcagcagcctgcagcctgaagattttgcaacttattactgtctacagcataatagttaccctcggacttttggccaggggaccaagctggagatca

SEQ ID NO: 9455 - DNA, 319 bp, Homo sapiens
tcctatgagctgactcagccaccctcagtgtccgtgtccccaggacagacagccagcatcacctgctctggagataaattgggggataaatatgcttgctggtatcagcagaagccaggccagtcccctgtgctggtcatctatcaagatagcaagcggccctcagggatccctgagcgattctctggctccaactctgggaacacagccactctgaccatcagcgggacccaggctatggatgaggctgactattactgtcaggcgtgggacagcagcactgctgtcttcggaactgggaccaaggtcaccgtcctag

SEQ ID NO: 9456 - DNA, 325 bp, Homo sapiens
gaaattgtgttgacgcagtctccaggcaccctgtctttgtctccaggggaaagagccaccctctcctgcagggccagtcagaatgttagcagcaactacttagcctggttccagcagaaacctggccaggctcccaggctcctcatctatggtgcatccagcagggccactggcatcccagacaggttcagtggcagtgggtctgggacagacttcactctcaccatcagcagactggagcctgaagattttgcagtgtattactgtcagcagtttggtagctcaccgtggacgttcggccaagggaccaaggtggaaatcaaac

SEQ ID NO: 9457 - DNA, 331 bp, Homo sapiens
cagtctgccctgactcagcctcgctcagtgtccgggtctcctggacagtcagtcaccatctcctgcactggaaccaacagtgatgttggtggttataactatgtctcctggtaccaacagcacccaggcaaagcccccaaactcatcgtttttgatgtcagtaagcggccctcaggggtccctgagcgcttctctggctccacgtctggcaacacggcctccctgaccatctctgggctccagactgaggatgaggctgattattactgctgctcatatgcaggcagttacactctggtattcggcggagggaccaagctgaccgtcctag

SEQ ID NO: 9458 - DNA, 337 bp, Homo sapiens
gatattgtgatgactcagtctccactctccctgcccgtcatccctggagagccggcctccatctcctgcaggtctagtcagagcctcctgcatagtaatggacacaactatttggattggtacctgcagaagccagggcagtctccacagctcctgatctatttgggttctaatcgggcctccggggtccctgacaggttcagtggcagtggatcaggcagagattttacactgaaaatcagcagagcggaggctgaggatgttggggtttattactgcatgcaagctctacaaactcctctcactttcggcggagggaccaaggtggagatcaaac

SEQ ID NO: 9459 - DNA, 334 bp, Homo sapiens
cagtctgtgctgatgcagccgccctcagtgtctggggccccagggcagagggtcaccatctcctgcactgggagcagctccaacatcggggcagattatgatgtacactggtaccagcagcttccaggaacagcccccaaactcctcatctatgataacaacaatcggccctcaggggtccctgaccgattctctggctccaagtctggcacctcagcctccctggccatcagtgggctccaggctgaggatgaggctgattattactgccagtcctatgacagcagcctgagtggcgtggtattcggcggagggaccaagctgaccgtcctag

SEQ ID NO: 9460 - DNA, 322 bp, Homo sapiens
gacatccagatgacccagtctccatcctccctgtctgcatctgtaggagacagagtcaccatcacttgccgggcaagtcagagtattagtgactatttaaattggcatcagcagaaaccagggaaagccccaaacctcctgatctacgctgcatccagtttgcaaagtggggtcccatcaaggttcagtggcagtggatctgggacagatttcactctcaccatcagcagtctgcaacctgaagattttgcaacttactactgtcaacagagttacagtaccccgtggacgttcggccaagggaccaaggtggaaatcaaac

SEQ ID NO: 9461 - DNA, 322 bp, Homo sapiens
gaaatagtgatgacgcagtctccagccaccctgtctgtgtctccaggggaaagagccaccctctcctgcagggccagtcagagtgttagcagcaacttagcctggtaccagcagaaacctggccaggctcccaggctcctcatctatggtgcatccaccagggccactggtatcccagccaggttcagtggcagtgggtctgggacagagttcactctcaccatcagcagcctgcagtctgaagattttgcagtttattactgtcagcagtataataactggcctctcactttcggcggagggaccaaggtggagatcaaac

SEQ ID NO: 9462 - DNA, 334 bp, Homo sapiens
cagtctgccctgactcagcctgcctccgtgtctgggtctcctggacagtcgatcaccatctcctgcactggaaccagcaatgacgttggtggttataactatgtctcctggtaccaacagcacccaggcaaagcccccaaactcatgatttatgatgtcagtaatcggccctcaggggtttctaatcgcttctctggctccaagtctggcaacacggcctccctgagcatctctgggctccaggctgaggacgaggctgattattactgcagctcatatacaagcagcagccctctcggggtattcggcggagggaccaagctgaccgtcctag

SEQ ID NO: 9463 - DNA, 319 bp, Homo sapiens
gaaattgtgttgacacagtctccagccaccctgtctttgtctccaggggaaagagccaccctctcctgcagggccagtcagagtgttagcagctacttagcctggtaccaacagaaacctggccaggctcccaggctcctcatctatgatgcatccaacagggccactggcatcccagccaggttcagtggcagtgggtctgggacagacttcactctcaccatcagcagcctagagcctgaagattttgcagtttattactgtcagcagcgtagcaactggccgacgttcggccaagggaccaaggtggaaatcaaac

SEQ ID NO: 9464 - DNA, 322 bp, Homo sapiens
gacatccagatgacccagtctccatcctccctgtctgcatctgtaggagacagagtcaccatcacttgccgggcaagtcagggcattagaaaggatttaagttggtatcagcaggaaccagggaaagcccctaagcgcctgatctatgctgcatccagtttgcaaagtggggtcccatcaaggttcagcggcagtggatctgggacagaattcactctcacaatcagcagcctgcagcctgaagattttgcaacttattactgtctgcagcatgatagttaccctcggacgttcggccaagggaccaaggtggaaatcaaac

SEQ ID NO: 9465 - DNA, 340 bp, Homo sapiens
gacatcgtgatgacccagtctccagactccctggctgtgtctctgggcgagagggccaccatcaactgcaagtccagccagagtgttttatacagctccagcaataagaactacttagcttggtaccagcagaagccaggacagcctcctaagctgctcatttactgggcatctacccgggaatcgggggtccctgaccgaatcagtggcagcgggtctgggacagatttcactctcaccatcagcagcctgcaggctgaagatgtggcagtttattactgtcagcaatattatagtactccgtgcagttttggccaggggaccaagctggagatcaaac

SEQ ID NO: 9466 - DNA, 314 bp, Homo sapiens
gacatccagatgacccagtctccatcttccgtgtctgcatctgtaggagacagagtcaccatcgcctgtcgggcgagtcaggatgttcgaaattggttagcctggtatcagcagaagccagggacagcccctaaactcctgatctctgctgcatccaatttggaaggtggggtcccgtcaaggttcagcggcagtggatctgggacagatttcactctcaccatcagcaatctgcagcctgatgattttgcagtttacttttgtcaacagactaaaagtttcccgatcaccttcggccacgggacacgactgga

SEQ ID NO: 9467 - DNA, 334 bp, Homo sapiens; identical to SEQ ID NO: 2354

SEQ ID NO: 9468 - DNA, 340 bp, Homo sapiens; identical to SEQ ID NO: 1590

SEQ ID NO: 9469 - DNA, 328 bp, Homo sapiens
gaaattgtgttgacacagtctccagccaccctgtctttgtctccaggggaaagagccaccctctcctgcagggccagtcagagtgttagcagctacttagcctggtaccaacagaaacctggccaggctcccaggctcctcatctatgatgcatccaacagggccactggcatcccagccaggttcagtggcagtgggtctgggacagacttcactctcaccatcagcagcctagagcctgaagattttgcagtttattactgtcagcagcgtagcaactggcctccgacgggcactttcggccctgggaccaaagtggatatcaaac

SEQ ID NO: 9470 - DNA, 322 bp, Homo sapiens
gccatccagatgacccagtctccatcctccctgtctgcatctgtaggagacagagtcaccatcacttgccgggcaagtcagggcattagaaatgatttaggctggtatcagcagaaaccagggaaagcccctaagctcctgatctatgctgcatccagtttacaaagtggggtcccatcaaggttcagcggcagtggatctggcacagatttcactctcaccatcagcagcctgcagcctgaagattttgcaacttattactgtctacaagattacaattacccattcactttcggccctgggaccaaagtggatatcaaac

SEQ ID NO: 9471 - DNA, 340 bp, Homo sapiens
gacatcgtgatgacccagtctccagactccctggctgtgtctctgggcgagagggccaccatcaactgcaagtccagccagagtgttttatacagctccaacaataagaactacttagcttggtaccagcagaaaccaggacagcctcctaagctgctcatttactgggcatctacccgggaatccggggtccctgaccgattcagtggcagcgggtctgggacagatttcactctcaccatcagcagcctgcaggctgaagatgtggcagtttattactgtcagcaatattatagtaacctcggcacttttggccaggggaccaagctggagatcaaac

SEQ ID NO: 9472 - DNA, 325 bp, Homo sapiens
gaaatagtgatgacgcagtctccagccaccctgtctgtgtctccaggggaaagagccaccctctcctgcagggccagtcagaatgttggcaccagcttagcctggtaccagcagaaacctggccagcctcccaggctcctcatctatggtgcatccaccagggccactggtatcccagccaggtttagtggcagtgggtctgggacagagttcactctcaccatcagcagcctgcagtctgaagattttgcagtttattattgtcaacagtataagaaatggcctccgctcactttcggccgagggaccaaggtggagatcaaac

SEQ ID NO: 9473 - DNA, 322 bp, Homo sapiens
gacatccagatgacccagtctccttccaccctgtctgcatctgtaggagacagagtcaccatcacctgccgggccagtcagagtcttacttactggttggcctggtatcaacagaaaccagggaaagcccctaaactcctgatctataaggcgtctagtttagaaagtggggtcccatcaaggttcagcggcagtggatctgggacagaattcactctcaccatcagcagcctgcagcctgatgattttgcaacttattactgccaacactatactagttcttcgagcagttttggccaggggaccaagctggagatcaaac

SEQ ID NO: 9474 - DNA, 319 bp, Homo sapiens
tcctatgagctgactcagccaccctcagtgtccgtgtccccaggacagacagccagcatcacctgctctggagataaattggggtataaatatgcttgctggtatcagcagaagccaggccagtcccctgtgttggtcatctaccaagataacaagcggccctcagggatccctgagcgattctctggctccaactctgggaacacagccactctgaccatcagcgggacccagactatggatgaggctgactattactgtcagacgtgggacagtagcactgcggtattcggcggagggaccaagctgaccgtcctag

SEQ ID NO: 9475 - DNA, 277 bp, Homo sapiens
tcctatgagctgacacagccaccctcggtgtcagtgtccccagggcagacggccaggatcacctgctctggagatgcattgccaaagcaatatgcttattggtaccagcagaagccaggccaggcccctgtgctggtgatatataaagacaatgcaacagtcacgttgaccatcagtggagtccaggcagaagacgaggctgactattactgtcaatcagcagacagcagtgatacttatgtcgtattcggcggagggaccaagctgaccgtcctag

SEQ ID NO: 9476 - DNA, 322 bp, Homo sapiens
gccatccagatgacccagtctccatcctccctgtctgcatctgtaggagacagagtcaccatcacttgccgggcaagtcagggcattagaaatgatttaggctggtatcagcagaaaccagggaaagcccctaagctcctgatctatgctgcatccagtttacaaagtggggtcccatcaaggttcagcggcagtggatctggcacagatttcactctcaccatcagcagcctgcagcctgaagattttgcaacttattactgtctacaagattacaattaccctccgacgttcggccaagggaccaaggtggaaatcaaac

SEQ ID NO: 9477 - DNA, 325 bp, Homo sapiens
tcctatgtgctgactcagccaccctcactgtcagtggccccaggaaagacggccaggattacctgtgggggaaacaacattggaagtaaaagtgtgcactggtaccagcagaagccaggccaggcccctgtgctggtcatctattatgatagcgaccggccctcagggatccctgagcgattctctggctccaactctgggaacacggccaccctgaccatcagcagggtcgaagccggggatgaggccgactattactgtcaggtgtgggatagtagtagtgatcatgtggtattcggcggagggaccaagctgaccgtcctag

SEQ ID NO: 9478 - DNA, 328 bp, Homo sapiens
tcctatgaactgacacagccaccctcggtgtcagtgtccccaggacaaacggccaggatcacctgctctggagatgcattgccaaaaaaatatgcttattggtaccagcagaagtcaggccaggcccctgtgctggtcatctatgaggacagcaaacgaccctccgggatccctgagagattcactggctccagctcagggacaatggccaccttgactatcagtggggcccaggtggaggatgaaggtgactactactgttactcaacagacattagtggtaatcctagaggggtattcggcggagggaccaagctgaccgtcctag

SEQ ID NO: 9479 - DNA, 325 bp, Homo sapiens; identical to SEQ ID NO: 6024

SEQ ID NO: 9480 - DNA, 325 bp, Homo sapiens
gaaattgtgttgacgcagtctccaggcaccctgtctttgtctccaggggaaagagccaccctctcctgcagggccagtcagattgttagtagcaactacttagcctggtatcagcagaaacctggccaggctcccaggctcctcatctatggtgcattcagcagggccactggcatcgcagacaggttcagtggcagtgggtctgggacagacttcactctcaccatcagcagactggagcctgaagattttgcagtgtattactgtcagcagtatagtggttcacctcgaacgttcggccaagggaccagggtggaaatcaaac

SEQ ID NO: 9481 - DNA, 316 bp, Homo sapiens
gaaattgtgttgacgcagtctccaggcaccctgtctttgtctccaggggaaagagccaccctctcctgcagggccagtcagagtgttagcagcaactacttagcctggtaccagcagagacctggccaggctcccaggctcctcatctatggtgcatccagcagggccactggcatcccagacaggttcagtggcagtgggtctgggacagacttcactctcaccatcagcagactggagcctgaagattttgcagtgtattactgtcagcagtatggtcgcacgttcggccaagggaccaaggtggaaatcaaac

SEQ ID NO: 9482 - DNA, 322 bp, Homo sapiens
gaaattgtgttgacacagtctccagccaccctgtctttgtctccaggggaaagagccaccctctcctgcagggccagtcagagtgttagcagctacttagcctggtaccaacagaaacctggccaggctcccaggctcctcatctatgatgcatccaacagggccactggcatcccagccaggttcagtggcagtgggtctgggacagacttcactctcaccatcagcagcctagagcctgaagattttgcagtttattactgtcagcagcgtagcaactggctccggacgttcggccaagggaccaaggtggaaatcaaac

SEQ ID NO: 9483 - DNA, 177 bp, Homo sapiens
gaagttatgctgtgggctgggatccctgaccgcttctctggctcaaagtctgggaccacagtctccctgactatctcgggcctctagcctgaggacgaggctgattattactgttcaacatgggaccacagtctcagtggtcgctattcggcggagggaccaagctgaccgtcctag

SEQ ID NO: 9484 - DNA, 331 bp, Homo sapiens
cagtctgtgctgactcagccaccctcagcgtctgggacccccgggcagagggtcaccatctcttgttctggaagcagctccaacatcgaaagtaatactgtaaactggtaccagcaactcccaggaacggcccccaaactcctcatctatactaataatcagcggccctcaggggtccctgaccgattctctggctccaagtctggcacctcagcctccctggccatcggtgggctccagtctgaggatgaggctgattattactgtgcagcatgggatgacagcctgaatggttatgtcctcggaactgggaccaaggtcaccgtcctag

SEQ ID NO: 9485 - DNA, 331 bp, Homo sapiens
cagtctgccctgactcagcctccctccgcgtccgggtctcctggacagtcactcaccatctcctgcactggagccagcagtgacgttggtggttatgactatgtctcctggtaccagcagcacccaggcaaagcccccaaactcatgatttatgaggttactaagcggccctcaggggtccctgatcgcttctctggctccaagtctggcaacacggcctccctgaccgtctctgggctccaggctgaggatgaggctgattattattgcagctcatatgcaggcagcttcacttgggtgttcggcggagggaccaagctgaccgtcctag

SEQ ID NO: 9486 - DNA, 331 bp, Homo sapiens
cagactgtggtgacccaggagccatcgttctcggtgtcccctggagggacagtcacactcacttgtggcttgagctctggctcagtctctactagtcactaccccagctggtaccagcagaccccaggccaggctccacgcacgctcatctacaacacaaacactcgctcttctggggtccctgatcgcttctttggctccatccttgggaacaaggctgccctcaccatcacgggggcccaggcagatgatgaatctgattattactgtgtactatatttgagtggtgacatttatgtcttcggagctgggaccaaggtcaccgtcctag

SEQ ID NO: 9487 - DNA, 319 bp, Homo sapiens
tcctatgagctgactcagccaccctcagtgtccgtgtccccaggacagacagccagcatcacctgctctggagataaattgggggataaatatgcttgctggtatcagcagaagccaggccagtcccctgtgctggtcatctatcaagatagcaagcggccctcagggatccctgagcgattctctggctccaactctgggaacacagccactctgaccatcagcgggacccaggctatggatgaggctgactattactgtcaggcgtgggacagcagcactgctgtattcggcggagggaccaagctgaccgtcctag

SEQ ID NO: 9488 - DNA, 322 bp, Homo sapiens; identical to SEQ ID NO: 6119

SEQ ID NO: 9489 - DNA, 331 bp, Homo sapiens
cagtctgccctgactcagcctgcctccgtgtctgggtctcctggacagtcgatcaccatctcctgcactggaaccagcagtgacgttggtggttataactatgtctcctggtaccaacagcacccagacaaagcccccaaagtcatgatttatgatgtcagtaatcggccctcaggggtttctaatcgcttctctggctccaagtctggcaacacggcctccctgaccatctctgggctccaggctgaggacgaggctgattattactgcagctcatatacaagcagcagcacttatgtcttcggaactgggaccaaggtcaccgtcctag

SEQ ID NO: 9490 - DNA, 340 bp, Homo sapiens
gacatcgtgatgacccagtctccagactccctggctctgtctctgggcgagagggccaccatcaactgcaagtccggccagagtgttttatacacctccaacaataagaactacttagcttggtaccagcagaaaccaggacagcctcctaagctgctcatttactgggcatctacccgggaatccggggtccctgaccgcttcagtggcagcgggtctgggacagatttcactctcaccatcagcagcctgcaggctgaagatgtggcaatttattactgtcagcaatattatactactccgtggacgttcggccaagggaccaaggtggaaatcaaac

SEQ ID NO: 9491 - DNA, 331 bp, Homo sapiens
cagtctgccctgactcagcctgcctccgtgtctgggtctcctggacagtcgatcaccatctcctgcactggaaccagcagtgacgctcgtggttataactatgtctcctggtaccaacaccacccaggcaaagcccccaaactcatgatttatgatgtcagtaatcggccctcaggggtttctaatcgcttctctggctccaagtctggcaacacggcctccctgaccatctctgggctccaggctgaggacgaggctgtttattactgcaactcgtattcaagcggcagcactgtagtattcggcggagggaccaagctgaccgtcctag

SEQ ID NO: 9492 - DNA, 322 bp, Homo sapiens
gacatccagatgacccagtctccatcctccctgtctgcatctgtaggagacagagtcaccatcacttgccgggcaagtcagggcattagaaatgatttaggctggtatcagcagaaaccagggaaagcccctaagcgcctgatctatgctgcatccagtttgcaaagtggggtcccatcaaggttcagcggcagtggatctgggacagaattcactctcacaatcagcagcctgcagcctgaagattttgcaacttattactgtctacagcataatagttactcgtggacgttcggccaagggaccaaggtggaaatcaaac

SEQ ID NO: 9493 - DNA, 331 bp, Homo sapiens
cagactgtggtgacccaggagccatcgttctcagtgtcccctggagggacagtcacactcacttgtggcttaagctctggctcagtctctactagttactaccccagctggtaccagcagaccccaggccaggctccacgcacgctcatctacagcacaaacattcgctcttctggggtccctgatcgcttctctggctccatccttgggaacaaagctgccctcatcatcacgggggcccaggcagatgatgaatctgactatcactgtgtgttgtatatgggtagtggcagttgggtgttcggcggagggaccaagctgaccgtcctag

SEQ ID NO: 9494 - DNA, 322 bp, Homo sapiens
gacatccagatgacccagtctccatcttccgtgtctgcatctgtgggagacagagtcaccatcacttgtcgggcgagtcaggttattagcggctggttagcctggtatcaggagaaaccagggaaagcccctaagctcctgatctatgctgcatccagtttgcaaagtggggtcccatcaaggttcagcggcgatggatctgggacagatttcactctcaccatcaacagcctgcagcctgaagattttgcaacttactattgtcaacaggctaacagtttccccctcactttcggcggagggaccaaggtggagatcaaac

SEQ ID NO: 9495 - DNA, 319 bp, Homo sapiens
gacatccagatgacccagtctccttccaccctgtctgcatctgtaggagacagagtcaccatcacttgccgggccagtcagaattttggtaacttggcctggtatcagcagaaaccagggaaagcccctaaagtcctaatctataaggcgtctaatttagaaagtggggtcccgtcaaggttcagcggcagtggatctgggacagaattcactctcaccatcagcagtctgcaacctgatgactttgcaacttattactgccaagattatagtaattacttgtatacatttggccaggggaccaagctggagatcaaac

SEQ ID NO: 9496 - DNA, 322 bp, Homo sapiens
gaaatagtgatgacgcagtctccagccaccctgtctgtgtctccaggggaaagagccaccctctcctgcagggccagtcagagtgttagcggcaacttagcctggtaccagcagagacctggccaggctcccagactcctcatctatggtgcatccaccagggccactggtatcccagccaggttcagtggcagtgggtctgggacagagttcactctcaccatcagcagcctgcagtctgaagattttgcagtttattactgtcagcagtataatcagtggcctcggacgttcggccaagggaccaaggtggaaatcaaac

SEQ ID NO: 9497 - DNA, 328 bp, Homo sapiens
gaaattgtgttgacgcagtctccaggcaccctgtctttgtctccaggggaaagagccaccctctcctgcagggccagtcagagtgttagcagcagctacttagcctggtaccagcagaaacctggccaggctcccaggctcctcatctatggtgcatccagcagggccactggcatcccagacaggttcagtggcagtgggtctgggacagacttcactctcaccatcagcagactggagcctgaagattttgcagtgtattactgtcagcagtatggtagctcacttgcgctcactttcggcggagggaccaaggtggagatcaaac

SEQ ID NO: 9498 - DNA, 331 bp, Homo sapiens
cagtctgccctgactcagcctgcctccgtgtctgggtctcctggccagtcgatcaccatctcctgcactggaaccagcagtgatgttgggagttataaccttgtctcctggtaccaacagcacccaggcaaagcccccaaactcatgatttatgagggcagtaagcggccctcaggggtttctaatcgcttctctggctccaagtctggcaacacggcctccctgacaatctctgggctccaggcagaggacgaggctgattattactgccactcatatgcaggtagcagcacttatgtcttcggaattgggaccaaggtcaccgtcctag

SEQ ID NO: 9499 - DNA, 328 bp, Homo sapiens
tcctatgagctgacacagccaccctcggtgtcagtgtccccaggacagacggccaggatcacctgctctggagatgcattgccaaagcaatatgcttattggtaccagcagaagccaggccaggcccctgtgctggtgatatataaagacagtgagaggccctcagggatccctgagcgattctctggctccagctcagggacaacagtcacgttgaccatcagtggagtccaggcagaagacgaggctgactattactgtcaatcagcagacagcagtggtacttatccctgggtgttcggcggagggaccaagctgaccgtcctag

SEQ ID NO: 9500 - DNA, 328 bp, Homo sapiens
cagtctgccctgactcagcctgcctccgtgtctgggtctcctggacagtcgatcaccatctcctgcactggaaccagcagtgatgttgggaattataaccttgtctcctggtaccaacaccacccagacaaagcccccaaactcatgatttatgggggcaatgagcggccctcaggggtttctaatcgcttctctgcctccaagtctggcaacacggcctccctgacaatctctgggctccaggctgaggacgaggctgattattactgctgctcatatgcaggtgatagcgcggtattcggcggagggaccaagctgaccgtcctag

SEQ ID NO: 9501 - DNA, 322 bp, Homo sapiens
gaaatattcatgacgcagtctccagccaccctgtctgtgtctccaggggaaggagacaccctctcctgcagggccagtcagagtgttagcaccaacttagcctggtaccaacagaaacctggccaggctcccaggctcctcatccatggtgcatccaccagggcctctggtgtcccagcccggttcagtggcactgggtctgggacagacttcactctcaccatcagcagcctgcagtttgaagattttgcagtttattactgtcaacagtataatagttggccgttgacgttcggccaagggaccaaggtggaaatcaaac

SEQ ID NO: 9502 - DNA, 325 bp, Homo sapiens
tcctatgagctgacacagccaccctcggtgtcagtgtccccaggacaaacggccaggatcacctgctctggagatgcattgccaaaaaaatatgcttattggtaccagcagaagtcaggccaggcccctgtgctggtcatctatgaggacaacaaacgaccctccgggatccctgagagattctctggctccagctcagggacaatggccaccttgactatcagtggggcccaggtggaggatgaagctgactactactgttactcaacagacagcagtggtaatcatagtgtcttcggaactgggaccaaggtcaccgtcttag

SEQ ID NO: 9503 - DNA, 322 bp, Homo sapiens; identical to SEQ ID NO: 837

SEQ ID NO: 9504 - DNA, 325 bp, Homo sapiens
gaaattgtgttgacgcagtctccaggcaccctgtctttgtctccaggggaaagagtcaccctctcgtgcagggccagtcagagtgttagcagcagctacttagcctggtaccagcagaaacctggccaggctcccaggctcctcatctatggtgcatccagcagggcccctggcatcccagacaggttcagtggcagtgggtctgggacagacttcactctcaccatcagcagactggagcctgaagattttgcagtatactactgtcagcagtatggcagctcaccttggacgttcggccaagggaccaaggtggaaatcaaac

SEQ ID NO: 9505 - DNA, 322 bp, Homo sapiens; identical to SEQ ID NO: 837

SEQ ID NO: 9506 - DNA, 325 bp, Homo sapiens
tcttctgagctgactcaggaccctgctgtgtctgtggccttgggacagacagtcaggatcacatgccaaggagacagcctcagaacctattctgcaaattggtaccagcagaggccaggacaggcccctctacttgtcatctatgatgaaaacaaccggccctcagggatcccagaccgattctctggctccacctcaggaaacacagcttccttgaccatcactggggctcaggcggaagatgaggctgactattactgtaactcccgggacagcagtggtaaccaatatgtcttcggaactgggaccaaggtcaccgtcctag

SEQ ID NO: 9507 - DNA, 343 bp, Homo sapiens
gatattgtgatgacccagactccactctccctgcccgtcacccctggagagccggcctccatctcctgcaggtctagtcagagcctcttggatagtgatgatggaaacacctatttggactggtacctgcagaagccagggcagtctccacagctcctgatctatacgctttcctatcgggcctctggagtcccagacaggttcagtggcagtgggtcaggcactgatttcacactgaaaatcagcagggtggaggctgaggatgttggagtttattactgcatgcaacgtatagagtttccaatgtgcagttttggccaggggaccaagctggagatcaaac

SEQ ID NO: 9508 - DNA, 328 bp, Homo sapiens
cagtctgccctgactcagcctcgctcagtgtccgggtctcctggacagtcagtcaccatctcctgcactggaaccagcagtgatgttggtggttataactatgtctcctggtaccaacagcacccaggcaaagcccccaaactcatgatttatgatgtcagtaagcggccctcaggggtccctgatcgcttctctggctccaagtctggcaacacggcctccctgaccatctctgggctccaggctgaggatgaggctgattattactgctgctcatatgcaggcagcttttatgtcttcggaactgggaccaaggtcaccgtcctag

SEQ ID NO: 9509 - DNA, 325 bp, Homo sapiens
gacatccagatgacccagtctccatcctccctgtctgcatctgtaggagacagagtcaccatcacttgccgggcaagtcagagcattagcagctatttaaattggtatcagcagaaaccagggaaagcccctaagctcctgatctatgctgcatccagtttgcaaagtggggtcccatcaaggttcagtggcagtggatctgggacagatttcactctcaccatcagcagtctgcaacctgaagattttgcaacttactactgtcaacagagttacagtacccctagaatcaccttcggccaagggacacgactggagattaaac

SEQ ID NO: 9510 - DNA, 325 bp, Homo sapiens
gaaattgtgttgacacagtctccagccaccctgtctttgtctccaggggaaagagccaccctctcctgcagggccagtcagagtgttagcagctacttagcctggtaccaacagaaacctggccaggctcccaggctcctcatctatgatgcatccaacagggccactggcatcccagccaggttcagtggcagtgggtctgggacagacttcactctcaccatcagcagcctagagcctgaagattttgcagtttattactgtcagcagcgtagcaactggcctcgagggactttcggccctgggaccaaagtggatatcaaac

SEQ ID NO: 9511 - DNA, 322 bp, Homo sapiens
gacatccagatgacccagtctcaatcctcactgtctgcatctgtaggagacagagtcaccatcacttgtcgggcgagtcagggcatcagcaattatttagcctggtttcagcagaaaccagggaaagcccctaagtccctgatctatgctgcatccagtttgcaaagtggggtcccatcaaagttcagcggcagtggatctgggacagatttcactctcaccatcagcagcctgcagcctgaagattttgcaacttattactgccaacagtataaaagttaccccctcaccttcggccaagggacacgactggagattaaac

SEQ ID NO: 9512 - DNA, 334 bp, Homo sapiens
cagtctgtgctgacgcagccgccctcagtgtctggggccccagggcagagggtcaccatctcctgctctgggagcagctccaacatcgggtcaccttatgatgtacactggtaccaacatcttccaggaacagcccccaaactcctcatctatggtaacagcaatcggccctcaggggtccctgaccgattctctggctccaagtctggcacctcagcctccctggccatcactgggctccaggctgaggatgaggctgagtattactgccagtcctatgacagcagcctgagaggttatgtcttcggaactgggaccaaggtcaccgtcctag

SEQ ID NO: 9513 - DNA, 319 bp, Homo sapiens
tcctatgagctgactcagccactctcagtgtcagtggccctgggacagacggccaggattacctgtgggggaaacaacattggaagtaaaaatgtgcactggtaccagcagaagccaggccaggcccctgtgctggtcatctatagggatagcaaccggccctctgggatccctgagcgattctctggctccaactcggggaacacggccaccctgaccatcagcagagcccaagccggggatgaggctgactattactgtcaggtgtgggacagcagcactgtggtattcggcggagggaccaagctgaccgtcctag

SEQ ID NO: 9514 - DNA, 334 bp, Homo sapiens
cagtctgccctgactcagcctcgctcagtgtccgggtctcctggacagtcagtcaccatctcctgcactggaaccagcagtgatgttggtggttataactatgtctcctggtaccaacagcacccaggcaaagcccccaaactcatgatttatgatgtcagtaagcggccctcaggggtccctgatcgcttctctggctccaagtctggcaacacggcctccctgaccatctctgggctccaggctgaggatgaggctgattattactgctgctcatatgcaggcagctacactctttatgtcttcggaactgggaccaaggtcaccgtcctag

SEQ ID NO: 9515 - DNA, 324 bp, Homo sapiens
gaaattgtgttgacgcagtctccaggcaccctgtctttgtctccaggggaaagcgccaccctctcctgcagggccagtcagactattgccaacaggcacttagtctggtaccaacagaaacctggccaggctcccaggctcctcatctatggtgcatccagcagggccactgacgtcccagacaggttcagtggcggtgggtctgggacagacttcactctcaccatcagcagactggagcctgaagattttgcagtgtattattgtcagcagtatgatagttcagtgctcactttcggcggagggaccaaggtggagatcaaa

SEQ ID NO: 9516 - DNA, 325 bp, Homo sapiens
gaaattgtgttgacgcagtctccaggcaccctgtctttgtctccaggggaaagagccaccctctcctgcagggccagtcagagtgttagcagcaactccttagtctggtaccagcagaaacctggccaggctcccaggctcctcatctatggtgcatccagcagggccactggcatcccagacaggttcagtggcagtgggtctgggacagacttcattctcaccatcagcagactggagcctgaagattttgcagtgtattattgtcagcagtatgatagttcagtgctcacgttcggcggagggaccaaggtggagatcaaac

SEQ ID NO: 9517 - DNA, 340 bp, Homo sapiens
cagtctgtgctgacgcagccgccctcagtgtctggggccccagggcagagggtcaccatctcctgcactgggggcagctccaacatcggggcaggttatgatgtacactggtaccagcagcttccaggaacagcccccaaactcctcatctatggtaacaacaatcggccctcaggggtccctgaccgattctctggctccaagtctggcacctcagcctccctggccatcagtgggctccagggtgaggatgaggctgattattactgccagtcctatgacagcagcctgagtggccgttatgtggtattcggcggagggaccaagctgaccgtcctag

SEQ ID NO: 9518 - DNA, 325 bp, Homo sapiens; identical to SEQ ID NO: 9234

SEQ ID NO: 9519 - DNA, 325 bp, Homo sapiens; identical to SEQ ID NO: 2568

SEQ ID NO: 9520 - DNA, 328 bp, Homo sapiens
gaaattgtgttgacacagtctccagccaccctgtctttgtctccaggggaaagagccaccctctcctgcagggccagtcagagtgttagcagctacttagcctggtaccaacagaaacctggccaggctcccaggctcctcatctatgatgcatccaacagggccactggcatcccagccaggttcagtggcagtgggtctgggacagacttcactctcaccatcagcagcctagagcctgaagattttgcagtttattactgtcagcagcgtagcaactggccccctatgtacacttttggccaggggaccaagctggagatcaaac

SEQ ID NO: 9521 - DNA, 325 bp, Homo sapiens; identical to SEQ ID NO: 883

SEQ ID NO: 9522 - DNA, 331 bp, Homo sapiens
cagtctgccctgactcagcctccctccgcgtccgggtctcctggacagtcagtcgccatctcctgcactggaaccagcagtgacgttggtgattataactatgtctcctggtaccaacaacacccaggcaaggcccccaaactcatgatttatgaggtcagtaagcggccctcaggggtccctgatcgcttctctggctccaagtctggcaacacggcctccctgaccgtctctgggctccaggctgaggatgaggctgattattactgcgtctcatatgcaggcagcagcaatttcatcttcggcggggggaccaagctgaccgtcctag

SEQ ID NO: 9523 - DNA, 313 bp, Homo sapiens
gaaattgtgttgacacagtctccagccaccctgtctttgtctccaggggaaagagccaccctctcctgcagggccagtcagagtgttagcacctacttagcctggtaccaacagaaacctggccaggctcccaggctcctcatctatgatgcatccaacagggccactggcatcccagccaggttcagtggcagtgggtctgggacagacttcactctcaccatcagcagcctagagcctgaagattttgcagtttattactgtcagcagcgtagccggactttcggccctgggaccaaagtggatatcaaac

SEQ ID NO: 9524 - DNA, 334 bp, Homo sapiens
cagtctgccctgactcagcctgcctccgtgtctgggtctcctggacagtcgatcaccatctcctgcactggaaccagcagtgatgttgggagttataaccttgtctcctggtaccaacagcacccaggcgaagcccccaaactcatgatttatgagggcagtaagcggccctcaggggtttctaatcgcttctctggctccaagtctggcaacacggcctccctgacaatctctgggctccaggctgaggacgaggctgattattactgctgctcatatgcaggtagtagcacttattatgtctttggaaatgggaccaaggtcatcgtcttag

SEQ ID NO: 9525 - DNA, 331 bp, Homo sapiens
cagtctgccctgactcagcctgcctccgtgtctgggtctcctggacagtcgatcaccatctcctgcactggaaccagcagtgacgttggtcgttataactatgtctcctggtaccaacaacacccaggcaaagcccccgaactcatgatttatgatgtcagtaatcggccctcaggggtttcttatcgcttctctggctccaagtctggcagcacggcctccctgaccatctctgggctccaggctgaggacgaggctgattattactgcagctcatatacgaccagttatactttggtgttcggcggagggaccaagctgaccgtcctag

SEQ ID NO: 9526 - DNA, 325 bp, Homo sapiens
tcctatgtgctgactcagccaccctcagtgtcagtggccccaggaaagacggccaggattacctgtgggggaaacaacattggaagtaaaagtgtgcactggtaccagcagaagccaggccaggcccctgtgttggtcatctattatgatagggaccggccctcagggatccctgagcgattctctggctccaactctgggaacacggccaccctgaccatcagcagggtcgaagccggggatgaggccgactattactgtcaggtgtgggatagtagtagtgatcattatgtcttcggaactgggaccaaggtcaccgtcctag

SEQ ID NO: 9527 - DNA, 332 bp, Homo sapiens
cagtctgtgctgactcagccaccctcagcgtctgggacccccgggcagagggtcaccatctcttgttctggaagcagctccaacatcggaggtaatcctgtaaactggtaccagcagctcccagggacggcccccaaactcctcatctatagtgataatcagcggccctcaggggtccctgaccgattctctggctccaagtctgccacctcagcctccctggccatcagtgggctccagtctgaggatgaggctgattattactgtgcagcatgggatgacaacctgaatggtcggggtgtttggcggagggaccaacctgaccgtcctag

SEQ ID NO: 9528 - DNA, 325 bp, Homo sapiens; identical to SEQ ID NO: 965

SEQ ID NO: 9529 - DNA, 317 bp, Homo sapiens
tcttatgacctgactcagccaccctcagcgtccgtggcaccaggacagacagccaccatcacgtgttttggagataagttggggactaagtatgtttggtggcatcagcagaaggcaggccagtcccctctattggtcatctctcaggataaccagcggccctcggggatccctgagcgattctctggctccaattctgggaacacagccactctgaccatcagcgagacgcagacactggatgaggcggactattactgccagacgtgggacgacaactctgcggtttttggcggagggaccaaactgaccgtcct

SEQ ID NO: 9530 - DNA, 331 bp, Homo sapiens
cagtctgccctgactcagcctccctccgcgtccgggtctcctggacagtcagtcaccatctcctgcactggaaccagcagtaatgttggtgattctaattatgtctcctggtaccaacagtacccaggcaaagcccccaaactcttgctttatgaggtcactaagcggccctcaggggtccctgatcgcttctctggctccaagtctggcaacacggcctccctgaccgtctctgggctccagcctgaggatgaggctgattattactgcagctcatatgcaggcgccaacaattatgtcttcggaactgggaccaaggtcaccgtcctag

SEQ ID NO: 9531 - DNA, 331 bp, Homo sapiens
cagtctgccctgactcagcctccctccgcgtccgggtctcctggacagtcagtcaccatctcctgcactggaaccagcagtgacgttggtggttataactatgtctcctggtaccaacatcacccaggcaaagcccccaaactcatgatttatgaggtcagtaagcggccctcaggggtccctgatcgcttctctggctccaagtctggcaacacggcctccctgaccgtctctgggctccaggctgaggatgaggctgattattactgcagctcatatgcaggcagcaacaattgggtgttcggcggagggaccaagctgaccgtcctag

SEQ ID NO: 9532 - DNA, 331 bp, Homo sapiens
cagtctgccctgactcagcctccctccgcgtccgggtctcctggacagtcagtcaccatctcctgcactggaaccagcagtgacgttggtggttataactatgtctcctggtaccaacagcacccaggcaaagcccccaaactcatgatttatgaggtcagtaagcggccctcaggggtccctgatcgcttctctggctccaagtctggcaacacggcctccctgaccgtctctgggctccagcctgaggatgaggctgattattactgcaactcatatgcaggcatcaacaatttggtattcggcggagggaccaagctgaccgtcctag

SEQ ID NO: 9533 - DNA, 337 bp, Homo sapiens
gacatcgtgatgacccagtctccagactccctggctgtgtctctgggcgagagggccaccatcaactgcaagtccagccagagtgttttatacagctccaacaataagaactacttagcttggtaccagcacaaaccaggacagcctcctaagctgctcatttactgggcatctacccgggaatccggggtccctgaccgattcagtggcagcgggtctgggacagatttcactctcaccatcagcagcctgcaggctgaagatgtggcagtttattactgtcagcaatattatagtacttgcacttttggccaggggaccaagctggagatcaaac

SEQ ID NO: 9534 - DNA, 334 bp, Homo sapiens
cagtctgtgctgacgcagccgccctcagtgtctggggccccagggcagagggtcaccatctcctgcactgggagcagcttcaacatcggggcaggttatgatgtacactggtaccagcagcttccaggcacagcccccaaactcctcatctatgataacagcaatcggccctcaggggtccctgaccgattctctggctccaagtctggcacctcagcctccctggccatcactgggctccaggctgaagatgaggctgattattactgccagtcctatgacagtgctttgagtggttgggtgttcggcggagggaccaagctgaccgtcctag

SEQ ID NO: 9535 - DNA, 322 bp, Homo sapiens
gacatccagatgacccagtctccatcttctgtgtctacatctgtaggagacagaatcaccatcacttgtcgggcgagtcagggtatcagcagctggttagcctggtatcaacagaaaccagggaaagcccctaaggtcctgatatatggtgcatccaggttgcaaagtggggtcccatcaaggttcagcggcagtggatctgggacagatttcactctcactatcagcagcctgcagcctgaagattttgcaacttactattgtctgcagactaaagatttccctctcactttcggcggagggaccaaggtggagatcaaac

SEQ ID NO: 9536 - DNA, 325 bp, Homo sapiens
gaaattgtgttgacgcagtctccaggcaccctgtctttgtctccaggggaaagagccaccctctcctgcagggccagtcagagtgttagcagcagctacttagcctggtaccggcagaaaccaggccaggctcccaggctcctcatctatggtgcattcaccagggccactggcatcccagacaggttcagtggcagtgggtctgggacagacttcactctcaccatcagcagactggagcctgaagattttgcagtgtattactgtcagcagtatggtagttcacgggggacgttcggccaagggaccaaggtggaaatcaaac

SEQ ID NO: 9537 - DNA, 325 bp, Homo sapiens
gaaattgtgttgacgcagtctccaggcaccctgtctttgtctccaggggaaagagccaccctctcctgcagggccagtcagagtgttagcagcagctacttaggctggtatcagcagaaacctggccaggctcccaggctcctcatctatggtgcatccagcagggccactggcatcccagacaggttcaatggcagtgggtctgggacagacttctctctcaccatcagcaggctggagcctgaagattttgcagtgtattactgtcagcagtatggtagctcactgtggacgttcggccaagggaccaaggtggaaatcaaac

SEQ ID NO: 9538 - DNA, 325 bp, Homo sapiens
gaaattgtgttgacgcagtctccaggcaccctgtctttgtctccaggggaaagagccaccctctcctgcagggccagtcagagtgttagcagcagctacttagcctggtaccagcagaaacctggccaggctcccaggctcctcatctatggtgcatccagcagggccactggcatcccagacaggttcagtggcagtgggtctgggacagacttcactctcaccatcagcagactggagcctgaagattttgcagtgtattactgtcagcagtatggtagctcactttggacgttcggccaagggaccaaggtggaaatcaaac

SEQ ID NO: 9539 - DNA, 331 bp, Homo sapiens
cagtctgtgctgactcagtcaccctcagcgtctgggacccccgggcagagggtcaccatctcttgttttggaagcagctccaacatcggaagtaattatgtgcactggtaccagcaggtcccaggaacggcccccaaactcctcatctataaaaataatcagcgaccctcaggtgtccctgaccgattctctggctccaagtccggcacctcagcctccctggccatcagtgggctccggtccgaggatgaggctgattattactgtgcatcatggcatgacagcctgcgtggctgggtgttcggcgaagggaccaagctgaccgtcctag

SEQ ID NO: 9540 - DNA, 322 bp, Homo sapiens; identical to SEQ ID NO: 3554

SEQ ID NO: 9541 - DNA, 331 bp, Homo sapiens
cagactgtggtgacccaagagccctcgttctcagtgtcccctggagggacagtcacactcacttgtggcttgagctctggctcagtctctactggttactaccccagctggtcccagcagaccccaggccacgctccacgcacgctcatctacagcacaaacactcgctcttctggggtccctgatcgcttctctggctccatccttgggaacaaagccgccctcaccatcacgggggcccaggcagatgatgaatctgattattactgtgtgctgtatatgggtagtggcatttgggtgttcggcggagggaccaagctgaccgtcctag

SEQ ID NO: 9542 - DNA, 331 bp, Homo sapiens
cagtctgcgctgactcagccaccctcagcgtctgggacccccgggcagagggtcaccatctcttgttctggaagcagctcccacttcggaaataattatatatactggtaccagcacctcccaggaacggcccccaaactcctcatctataatgattatcagcggccctcaggggtccctgaccgattctctggctccaagtctggcacctcagcctccctggccatcagtgggctccggtccgaggatgaggctgattattattgtgcagcatgggataagatcctgggcggtcgggtgttcggcggagggaccaaggtgaccgtcctag

SEQ ID NO: 9543 - DNA, 361 bp, Homo sapiens
caggtgcagctgcagcagtcaggtccaggactggtgaagccctcgcagaccctctcactcacctgtgccatctccggggacagtgtctctagtaacagtgctgcttggaactggatcaggcagtccccatcgagaggccttgagtggctgggaaggacataccacaggtccaagtggtttaatgattatgcactgtctgtgaaaggtcgaataaccatcaacccagacacatccaggaaccagatctccctgcagttgaactctatgagtcccgaggacacggctgtgtattattgtgtaagattagtgggagcaacagtcgactactggggccagggaaccctggtcagcgtctcctcag

SEQ ID NO: 9544 - DNA, 361 bp, Homo sapiens; identical to SEQ ID NO: 9543

SEQ ID NO: 9545 - DNA, 361 bp, Homo sapiens
caggtgcagctgcagcagtcaggtccaggactggtgaagccctcgcagaccctctcactcacctgtgccatctccggggacagtgtctctagcaacagtgctgcttggaactggatcaggcagtccccatcgagaggccttgagtggctgggaaggacatactacaggtccaagtggtttaatgattatgcactgtctgtgaaaggtcgaataaccatcaacccagacacatccaggaaccagctctccctgcagctgaactctgtgagtcccgaggacacggctgtgtattattgtgtaagactagtgggagctacagtcgactactggggccagggaaccctggtcagcgtctcctcag

SEQ ID NO: 9546 - DNA, 361 bp, Homo sapiens
caagtgcagctgcagcagtcaggtccaggactggtgaagccctcgcagaccctctcactcacctgtgccatctccggggacagtgtctctagcaacagtgctgcttggaactggatcaggcagtccccatcgagaggccttgagtggctgggaaggacatactacaggtccaagtggtttaatgattatgcactgtctgtaaaaggtcgaataaccatcaacccagacacatccaggaaccagttctccctgcagctgaactctgtgagtcccgaggacacggctgtgtattattgtgtaagactagtgggagctacagtcgactactggggccagggaaccctggtcagcgtctcctcag

SEQ ID NO: 9547 - DNA, 361 bp, Homo sapiens; identical to SEQ ID NO: 9543

SEQ ID NO: 9548 - DNA, 370 bp, Homo sapiens
cagttgcaactgcaggagtcgggcccaggactggtgaggccttcggagaccctgtccctcacctgcactgtctctggcgcctccgtcagcagtactctttattattggggctggatccgccagcccccagggaagggactggagtggattgggaatatctattacagtgggagcacctacttcaacccgtccctcaagagtcgagtcaccatatccgtagacacgtcgaagaaccagttctccctggacctgaggtctgtgaccgccgcagacacggctatgtattactgtgcgaaactccccggcccctatagcaacaactggtatttcctgatctggggccagggatccctggtcaccgtctcctcag

SEQ ID NO: 9549 - DNA, 370 bp, Homo sapiens; identical to SEQ ID NO: 9548

SEQ ID NO: 9550 - DNA, 370 bp, Homo sapiens; identical to SEQ ID NO: 9548

SEQ ID NO: 9551 - DNA, 370 bp, Homo sapiens; identical to SEQ ID NO: 9548

SEQ ID NO: 9552 - DNA, 370 bp, Homo sapiens
gaggtgcagctgtcggagtctgggggaggcttggtacagcctggggggtccctgagactctcctgtgcagcctctggattcacctttagcagctatgccatgagctgggtccgccaggctccagggaaggggctggagtgggtctcagctattagtggtagtggtggtagcacatactacgcagactccgtgaagggccggttcaccatctccagagacaattccaagaacacggtgtctctgcaaatgaacagcctgagagccgaggacacggccgtatattactgtgcgatgcccaccggaatatctatgactacgtttgggggagtgaactactggggccagggaaccctggtcaccgtctcctcag

SEQ ID NO: 9553 - DNA, 370 bp, Homo sapiens; identical to SEQ ID NO: 9552

SEQ ID NO: 9554 - DNA, 370 bp, Homo sapiens; identical to SEQ ID NO: 9552

SEQ ID NO: 9555 - DNA, 370 bp, Homo sapiens; identical to SEQ ID NO: 9552

SEQ ID NO: 9556 - DNA, 367 bp, Homo sapiens
gaagtgcgactggtggagtctgggggaggcttggtccagccaggggggtccctgagactctcctgtgcagcctctggattcatcttcagtgatcgctggatgtcctgggtccgccagattccagagaaggggctggagtgggtggccgctataagacaggatggaaatgagaggtactatgtggactctgtaaagggccgattcaccatctccagagacaacgccaggagctcactgtttctacagatgaacaacctgagagccggggacacgggtgtgtacttctgtgtaaaagacgggggcctgggctacgattaccacttattcgacccctggggccagggagccgtggtcaccgtctcgtcag

SEQ ID NO: 9557 - DNA, 367 bp, Homo sapiens; identical to SEQ ID NO: 9556

SEQ ID NO: 9558 - DNA, 367 bp, Homo sapiens; identical to SEQ ID NO: 9556

SEQ ID NO: 9559 - DNA, 367 bp, Homo sapiens; identical to SEQ ID NO: 9556

SEQ ID NO: 9560 - DNA, 364 bp, Homo sapiens
caggtgcagctgcaggagtcgggcccaggactggtgaagccttcggagaccctgtccctcacctgcagtgtctatggtgcgtctttcactgattactactggacctggatccgccagcccccagggaaggggctggagtgggttggggaaaccaattggagtggaagcaccacctacaacccgtccctcaagagtcgagtcaccatatcagtagacacgtccaagagccagttctccctggagctgacttctgtgaccgccgcggacacggctatatactattgtgcgagagacataacagaagctcgtgctaggggctggttcgacccctggggtcagggaatcctggtcaccgtctcctcag

SEQ ID NO: 9561 - DNA, 364 bp, Homo sapiens
caagtgcaactgcgccagtggggcgcaggactgttgaagccttcggagaccctgtccctcacttgcagtgtctatggtgcgtctttcactgattactactggacctggatccgccagtccccagggaaggggctggagtgggttggggaaacaaattggagtggaagcaccacctacaacccgtccctcaagagtcgagtcaccatatcagtagacacgtccaagagccagttctccctggagctgacttctgtgaccgccgcggacacggctatatactattgtgcgagagacataacagaaactcgtgctaggggctggttcgacccctggggtcagggaatcctggtcaccgtctcctcag

SEQ ID NO: 9562 - DNA, 364 bp, Homo sapiens
caagtgcaactgcggcagtggggcgcaggactgttgaagccttcggagaccctgtccctcacctgcagtgtctatggtgcgtctttcactgattactactggacctggatccgccagcccccagggaaggggctggagtgggttggggaaaccaattggagtggaagcaccacctacaacccgtccctcaagagtcgagtcaccatatcagtagacacgtccaagagccagttctccctggagctgacttctgtgaccgccgcggacacggctgtatactattgtgcgagagacataacagaagctcgtgctaggggctggttcgacccctggggtcagggaatcctggtcaccgtctcctcag

SEQ ID NO: 9563 - DNA, 364 bp, Homo sapiens
caagtgcaactgcggcagtggggcgcaggactgttgaagccttcggagaccctgtccctcacctgcagtgtctatggtgcatctttcactgattactactggacctggatccgccagcccccagggaaggggctggagtgggttggggaaaccaattggagtggaagtaccacctacaacccgtccctcaagagtcgagtcaccatatcagtagacacgtccaagagccagttctccctggagctgacttctgtgaccgccgcggacacggctatatactattgtgcgagagacataacagaagctcgtgctaggggctggttcgacccctggggtcagggactcctggtcaccgtctcctcag

SEQ ID NO: 9564 - DNA, 369 bp, Homo sapiens
caggtgcagctggtgcagtctggggctgaggtgaagaagcctggggcctcagtgaaggtctcctgcaaggcttctggatacaccttcaccggccagtatatacacttggtgcgacaggcccctggacaagggcttgagtggatgggatggatcaaccctaacagtggtgccacaaactatgcacagaagtttcagggcagggtcaccatgaccagggacacgtccatcagtactgcctacatggagctgagcagactgacatctgacgacacggccgtttattactgtgcgagagatcggggggaagtagtaccagcttggaacgctatggacgtctggggccaagggaccacggtcaccgtctcctca

SEQ ID NO: 9565 - DNA, 369 bp, Homo sapiens; identical to SEQ ID NO: 9564

SEQ ID NO: 9566 - DNA, 369 bp, Homo sapiens; identical to SEQ ID NO: 9564

SEQ ID NO: 9567 - DNA, 382 bp, Homo sapiens
caggtccagctggtacagtctggggctgaggtgaagaagcctggggcctcagtgaaggtctcctgcaaggtttccggatacaccctcgttgaattatccatccactgggtgcgacaggctcctggaaaagggcttgagtggatgggaggttttaatcctgaagatggtgaaacaatctacgcacagaagttccagggcagagtcaccatgaccgaggacacatctacagacacagcctacatggagctgagcagcctaagatctgaggacacggccttatattattgtgcaacaggagccgtctgtccgcctgggatggactgcccgagggcgacctggttcgacccctggggccagggaaccctggtcaccgtctcctcag

SEQ ID NO: 9568 - DNA, 382 bp, Homo sapiens
caggtccagctggtgcagtctggggctgaggtgaagaagcctggggcctcagtgaaggtctcctgcaaggtttccggatacaccctcgttgaattatccatgcactgggtgcgccaggctcctggaaaagggcttgagtggatgggaggttttgagcctgaagatggtgaaacaatctacgcacagaagttccagggcagagtcaccatgaccgaggacacatctactgacacagcctacatggaactgagcagcctgagatctgaggacacggccgtctattactgtgcaacaggagccgtctgtccgcctggggtggactgtccgagggcgagctggttcgacccctggggccagggaacccgggtcaccgtgtccgcag

SEQ ID NO: 9569 - DNA, 382 bp, Homo sapiens
caggtccagctggtacagtctggggctgaggtgaagaagcctggggcctcagtgaaggtctcctgcaaggtttccggatacaccctcactgaattatccatgcactgggtgcgacaggctcctggaaaagggcttgagtggatgggaggttttgatcctgaagatggtgaaacaatctacgcacagaagttccagggcagagtcaccatgaccgaggacacatctacagacacagcctacatggagctgagcagcctgagatctgaggacacggccgtgtattactgtgcaacaggagccgtctgtccgcctggggtggactgcccgagggcgagctggttcgacccctggggccagggaaccctggtcaccgtctcctcag

SEQ ID NO: 9570 - DNA, 384 bp, Homo sapiens
gaagtgcagctggtggagtctgggggagccgtggtacagcctggggggtccctgagactctcctgtgcagcctctggattcccctttcgtcgttatgccatgcactgggtccgtcaagctccggggaaggctctggagtgggtctctcttattggtggagatggttatgacaccttcaccttctatgcagactctgtaaagggtcgattcaccatctccagggacaacagcaaaaactccctgtatctgcaaatgaacagtctgagacgcgaggacaccgccttgtatttctgtgcaaaagatggccctgacgggaatccccctatagagttctattatgctatggatgtctggggccaagggaccacggtcaccgtctcctca

SEQ ID NO: 9571 - DNA, 384 bp, Homo sapiens
gaagtgcagctggtggagtctgggggagccgtggtacagcctggggggtccctgagactctcctgtgcagcctctggattctcctttcgtcattatgccatgcactgggtccgtcaagctccggggaaggctctggagtgggtctctcttattggtggagatggttatgacaccttcaccttctatgcagactctgtaaagggtcgattcaccatctccagggacaacagcaaaaactccctgtatctgcaaatgaacagtctgagacgtgaggacaccgccttgtatttctgtgcaaaagatggccctgacgggaatccccctataaagttctattatgctatggatgtctggggccaagggaccacggtcaccgtctcctca

SEQ ID NO: 9572 - DNA, 384 bp, Homo sapiens
gaagtgcaggtggtggagtctgggggagccgtggtacagcctggggggtccctgagactctcctgtgcagcctctggattctcctttcgtcattatgccatgcactgggtccgtcaagctccggggaaggctctggagtgggtctctcttattggtggagatggttatgacaccttcaccttctatgcagactctgtaaagggtcgattcaccatctccagggacaacagcaaaaactccctgtatctgcaaatgaacagtctgagacgtgaggacaccgccttgtatttctgtgcaaaagatggccctgacgggaatccccctataaagttctattatgctatggatgtctggggccaagggaccacggtcaccgtctcctca

SEQ ID NO: 9573 - DNA, 376 bp, Homo sapiens
gaggtgcagctgttggagtctgggggaggcttggtacagcctggggggtccctgagactctcctgtgcagcctctggattcacctttagcagctatgccatgagctgggtccgccaggctccagggaaggggctggagtgggtctcagctattcgcggtagtggtggtagcacatactacgcagactccgtgaagggccggttcaccatctccagagacaatcccaagaacacgctgtacctgcaaatgaacagcctgagagccgaggacacggccgtatattactgtgcgaaagtcgagtattatgatatcgtttgggggagttatcgtaggtttgactactggggccagggaaccctggtcaccgtctcctcag

SEQ ID NO: 9574 - DNA, 376 bp, Homo sapiens
gaggtgcagctgttggagtctgggggaggcttggtacagcctggggggtccctgagactctcctgtgcagcctctggattcacctttagcagctatgccatgagctgggtccgccaggctccagggaaggggctggagtgggtctcagctattagtggtagtggtggtagcacatactacgcagactccgtgaagggccggttcaccatctccagagacaattccaagaacacgctgtatctgcaaatgaacagcctgagagccgaggacacggccgtatattactgtgcgaaagtcgagtattatgatatcgtttgggggagttatcgtaggtttgactactggggccagggaaccctggtcaccgtctcctcag

SEQ ID NO: 9575 - DNA, 376 bp, Homo sapiens
gaggtgcagctgttggagtctgggggaggcttggtacagcctggggggtccctgagactctcctgtgcagcctctggattcacctttagcagctatgccatgagctgggtccgccaggctccagggaaggggctggagtgggtctcagctattcgcggtagtggtggtagcacatactacgcagactccgtgaagggccggttcaccatctccagagacaatcccaagaacacgctgtatctgcaaatgaacagcctgagagccgaggacacggccgtatattactgtgcgaaagtcgagtattatgatatcgtttgggggagttatcgtaggtttgactactggggccagggaaccctggtcaccgtctcctcag

SEQ ID NO: 9576 - DNA, 364 bp, Homo sapiens
caggtgcagctggtggagtctgggggaggcgtggtccagcctgggaggtccctgagactctcctgtgcagcgtctggattcaccttcagtaactatgggatgcactgggtccgccaggctccaggcaaggggctggagtgggtggcgtttatatggtttgatggaactaataaatactatgcagactccgtgaagggccgattcaccatctccagagacaattccaagaacacgctgtatttggaagtgagcagcctgagaactgaggacacggctgtgtattactgtgcaagaactaacaatgggaactacaacggctactttgactactggggccagggaaccctggtcaccgtctcctcag

SEQ ID NO: 9577 - DNA, 364 bp, Homo sapiens
caggtgcagctggtggagtctgggggaggcgtggtccagcctgggaggtccctgagactctcctgtgcagcgtctggattcaccttcagtagctatggcatgcactgggtccgccaggctccaggcaaggggctggagtgggtggcagttatatggtatgatggaagtactaaatactatgcagactccgtgaagggccgattcaccatctccagagacaattccaagaacacgctgtatttggaagtgagcagcctgagaactgaggacacggctgtgtattactgtgcaagaactaacaatgggaactacaacggctactttgactactggggccagggaaccctggtcaccgtctcctcag

SEQ ID NO: 9578 - DNA, 364 bp, Homo sapiens
caggtgcagctggtggagtctgggggaggcgtggtccagcctgggaggtccctgagactctcctgtgcagcgtctggattcaccttcagtagctatggcatgcactgggtccgccaggctccaggcaaggggctggagtgggtggcagttatatggtatgatggaagtaaaaaatattatgcagactccgtgaagggccgattcaccatctccagagacaattccaagaacacgctgtatttggaagtgagcagcctgagaactgaggacacggctgtgtattactgtgcaagaactaacaatgggaactacaacggctactttgactactggggccagggaaccctggtcaccgtctcctcag

SEQ ID NO: 9579 - DNA, 372 bp, Homo sapiens
gaggtgcagctggtggagtctgggggaggcctggtcaagcctggggggtccctgagactctcctgtgcagcctctggattcaccttcagtagctatagcatgaactgggtccgccaggctccagggaaggggctggagtgggtctcatccattagtagtagtagtagttacatatactacgcagactcagtgaagggccgattcaccatctccagagacaacgccaagaactcactgtatctgcaaatgaacagcctgagagccgaggacacggctgtgtattactgtgcgagcctctatggtttgggaccacattactactactacggtatggacgtctggggccaagggaccacggtcaccgtctcctca

SEQ ID NO: 9580 - DNA, 372 bp, Homo sapiens; identical to SEQ ID NO: 9579

SEQ ID NO: 9581 - DNA, 372 bp, Homo sapiens; identical to SEQ ID NO: 9579

SEQ ID NO: 9582 - DNA, 373 bp, Homo sapiens
caggtgcagctggtggagtctgggggaggcgtggtccagcctggggggtccctgagactctcctgtgcagcgtctggattcaccttcagtagctatggcatgcactgggtccgccaggctccaggcaaggggctggagtgggtggcatttatacggtatgatggaagtaataaatactatgcagactccgtgaagggccgattcaccatctccagagacaattccaagaacacgctgtatctgcaaatgaacagcctgagagctgaggacacggctgtgtattactgtgcgaaagatcccaattttgaggggagctacttcctcgctaactttgactactggggccagggaaccctggtcaccgtctcctcag

SEQ ID NO: 9583 - DNA, 373 bp, Homo sapiens
caggtgcagctggtggagtctgggggaggcgtggtccagcctggggggtccctgagactctcctgtgcagcgtctggattcgccttcagtagctatgccatgcactgggtccgccaggctccaggcaaggggctggagtgggtggcatttatacgctatgatggaaataataaatactatgcagactccgtgaagggccgattcaccatctccagagacaattccaagaacacgctgtatctgcaaatgagcagcctgagagctgaggacacggctgtgtattactgtgcgaaagatcccaattttgaggggagctacttcctcgctaagtttgactactggggccagggaaccctggtcaccgtctcctcag

SEQ ID NO: 9584 - DNA, 373 bp, Homo sapiens; identical to SEQ ID NO: 9583

SEQ ID NO: 9585 - DNA, 355 bp, Homo sapiens
caggtcaccttgagggagtctggtcctgcgctggtgaaacccacacagaccctcacactgacctgcaccttctctgggttctcactcaccactagcggaatgtgtgtgagctggatccgtcagcccccagggaaggccctggagtggcttgcactcattgattggggtgatgataaatactacagcacatctctgaagaccaggctcaccatctccagggacacctccaaaaaccaggtggtccttacaatgaccaacatggaccctgtggacacagccacgtattactgtgcacggaccttgaggcgggactttgactactggggccagggaaccctggtcaccgtctcctcag

SEQ ID NO: 9586 - DNA, 355 bp, Homo sapiens
caggtcaccttgagggagtctggtcctgcgctggtgaaacccacacagaccctcacactgacctgcaccttctctgggttctcactcagcactagtggaatgtgtgtaacctggatccgtcagcccccggggaaggccctggagtggcttgcactcattgattgggatgatgacaaatactacagcacatctctgaagaccaggctcaccatctccaaggacacctccaaaaaccaggtggtccttacaatgaccaacatggaccctgtggacacagccacgtattactgtgcacggaccttgaggcgggactttgactactggggccagggaaccctggtcaccgtctcctcag

SEQ ID NO: 9587 - DNA, 355 bp, Homo sapiens; identical to SEQ ID NO: 9585

SEQ ID NO: 9588 - DNA, 384 bp, Homo sapiens
gaggtgcagctggtggagtctgggggaggcttggtacagcctggggggtccctgagactctcctgtgcagcctctggattcaccttcagtagctatagcatgaactgggtccgccaggctccagggaaggggctggagtgggtttcatacattagtagtagtagtagtaccatatactacgcagactctgtgaagggccgattcaccatctccagagacaatgccaagaactcactgtatctgcaaatgaacagcctgagagacgaggacacggctgtgtattactgtgcgagtttttttggctcggtggcttcaacccgaccctttaaaaactactacggtatggacgtctggggccaagggaccacggtcaccgtctcctca

SEQ ID NO: 9589 - DNA, 384 bp, Homo sapiens; identical to SEQ ID NO: 9588

SEQ ID NO: 9590 - DNA, 384 bp, Homo sapiens; identical to SEQ ID NO: 9588

SEQ ID NO: 9591 - DNA, 367 bp, Homo sapiens
caggtgcagctggtgcagtctggggctgaagtgaagaagcctggggcctcagtgaaggtctcctgcaaggcttctggatacaccttcaccggctattatttgcactgggtgcgacaggcccctggacaagggcttgagtggatgggatggatcaaccctaacagtggtggcacaaactatgcacagaagtttcagggcagggtcaccatgaccagggacacgtccatcatcacagcctacatggaactgagcagactgagatctgacgacacggccgtgtattactgtgcgagagattctggggaaaacgtattactatggtccggggacaactggggccagggaaccctggtcaccgtctcctcag

SEQ ID NO: 9592 - DNA, 367 bp, Homo sapiens; identical to SEQ ID NO: 9591

SEQ ID NO: 9593 - DNA, 367 bp, Homo sapiens; identical to SEQ ID NO: 9591

SEQ ID NO: 9594 - DNA, 348 bp, Homo sapiens
gaggtgcagctgatggagtctggaggaggcttgatccagcctggggggtccctgagactctcctgtgcagcctctgggatcaccgtcagtagcaactacatgagctgggtccgccaggctccagggaaggggctggagtgggtctcagttatttatagtggtggtagcacattctacgcagactccgtgaagggccgattcaccatctccagagacaattccaagaacactctatatcttcagatgaacagcctgagagccgaggacacggccgtgtattactgtgcgagagatttggactattacgggatggacgtctggggccaagggaccacggtcgccgtctcc

SEQ ID NO: 9595 - DNA, 351 bp, Homo sapiens
gaggtgcagctggtggagtctggaggaggcttgatccagcctggggggtccctgagactctcctgtggagcctctgggttcaccgtcagtagcaactacatgagctgggtccgccaggctccagggaaggggctggagtgggtctcagttatttatgccggtggtagcacattctacgcagactccgtgaagggccgattcaccatctccagagacaattccaagaacacgctgtatctgcaaatgaacagcctgagagccgaggacacggccgtctattactgtacgagagacttagactactacggtatggacgtctggggccaagggaccacggtcaccgtctcctca

SEQ ID NO: 9596 - DNA, 351 bp, Homo sapiens
gaggtgcagctggtggagtctggaggaggcttggtccagtctggggggtccctaagactctcctgtgcagcctctgggctcatcgtcagtagcaactacatgaggtgggtccgccaggctccagggaaggggctggagtgggtctcacttatctatcccggtggtaccatatactacgcagactccgtgaagggccgattcaccacctccagagacaactccaagaacacgctgtatcttgaaatgaacagcctgagagccgaggacacggccgtgtattactgtgcgagagatctgcaatattacggtatggacgtctggggccaagggaccacggtcattgtctcctca

SEQ ID NO: 9597 - DNA, 381 bp, Homo sapiens
gaggtgcagctggtggagtctgggggaggcttggtccagcctggggggtccctgagactctcctgtgcagcctctggattcacctttagtagctattggatgagctgggtccgccaggctccagggaaggggctggagtgggtggccaacataaagcaagatggaagtgagaaatactatgtggactctgtgaagggccgattcaccatctccagagacaacgccaagaactcactgtatctgcaaatgaacagcctgagagccgaggacacggctgtgtattactgtgcgagagattgtagtaccagctgctatgcggattactactactactacggtatggacgtctggggccaagggaccacggtcaccgtctcctca

SEQ ID NO: 9598 - DNA, 381 bp, Homo sapiens
gaggtgcagctggtggagtctgggggaggcttggtccagcctggggggtccctgagactctcctgtacagcctctggattcatctttagtaggtcttggatgagctgggtccgccaggctccagggaaggggctggagtgggtggccaacataaagcaagatggaagtgagaaatactatgtggactctgtgaagggccgattcaccatctccagagacaacgccaagaactcactgtatctgcaaatgaacagcctgagagccgaggacacggctgtgtattactgtgcgagagattgtagtaccagctgctatgcggattactactactactacggtatggacgtctggggccaagggaccacggtcaccgtctcctca

SEQ ID NO: 9599 - DNA, 370 bp, Homo sapiens
caggtgcagctgcaggagtcgggcccaggactggtgaagccttcacagaccctgtccctcacctgcactgtctctgatggctccatcagcagtagtggttacttctggagctggatccgccagcacccagggaagggcctggagtggattggatacatctattacagtgggagcacctactacaacccgtccctcaagagtcgagttaccatatcagccgacacgtctaagaaccagttctccctgaggctgaactctgtgactgccgcggacacggccatgtattactgtgcgagtcttggctatggtaggccatttgggtactactttgactactggggccagggaaccctggtcaccgtctcctcag

SEQ ID NO: 9600 - DNA, 370 bp, Homo sapiens
caggtgcagctgcaggagtcgggcccaggactggtgaagccttcacagaccctgtccctcacctgcactgtctctggtggctccatcagcagtggtacttacttctggacctggatccgccagcacccagggaagggcctggagtggattgggtacatctattacagtgggagcacctactacaacccgtccctcaagagtcgagttaccatatcagtagacacgtctaagaaccagttctccctgaagctgagctctgtgactgccgcggacacggccgtgtattactgtgcgggtcttggctatggtaggccatttgggtactactttgactactggggccagggaaccctggtcaccgtctcctcag

SEQ ID NO: 9601 - DNA, 379 bp, Homo sapiens
cagatgcaggtggtgcagtctggggctgaggtgaagaagcctgggtcctcggtgaaggtgtcctgcaaggcttctggaggcaccttcagcaactatgctatcagctgggtgcgacaggcccctggacaagggcttgagtggatgggagggatcatccctatcttaggaacagcgaacgacgcacagaagttccagggcagactcacgattaccgcggacgaatccacgagcatcgcctacatggagctgaccagcctgagatctgaggacacggccgtgtattattgtgcgagaggaactcgatattgtactagtaccagctgctctccggcgtacttcgatctctggggccgtggcaccctggtcactgtctcctcag

SEQ ID NO: 9602 - DNA, 379 bp, Homo sapiens
caggtgcagctggtgcagtctggggctgaggtgaagaagcctgggtcctcggtgaaggtctcctgcaaggcttctggaggcaccttcatcaactatgctatcagctgggtgcgacaggcccctggacaagggcttgagtggatgggagggatcatccctatccttgggacagcaaattacgcacaggagttccagggcagagtcacgattaccgcggaggaatccatgaccacagccaacgtggagctgagcagcctgagatctgaggacacggccgtgtattattgtgcgagaggaacgcgatattgtactagttccagctgctctccggcgtacttcgatatctggggccgtggcaccctggtcactgtctcctcag

SEQ ID NO: 9603 - DNA, 376 bp, Homo sapiens
caggtgcagctgcagcagtcgggcccaggactggtgaagccttcggagaccctgtccctcacctgcactgtctctggtggctccatcaatagttactactggagctggatccggcagcccccagggaagggactggagtggattggctatatctattacagtgggagcaccaactacaacccctccctcaagagtcgagtcaccatatcattaaacacgtccaagaaccagttctccctgaacctgagctctgtgaccgctgcggacacggccgtatattactgtgcgagagagggttactatgatagcagtggttattatcaccatgatgcttttgatatctggggccaagggacaatggtcaccgtctcttcag

SEQ ID NO: 9604 - DNA, 376 bp, Homo sapiens
caggtgcagctgcagcagtcgggcccaggactggtgaagccttcggagaccctgtccctcacctgcactgtctctggtggctccgtcagtagttactactggagctggatccggcagcccccagggaagggactggagtggattgggtatatctattacagtgggagcaccaactacaacccctccctcaagagtcgagtcaccatatcagtagacacgtccaagaaccagttctccctgaagctgagctctgtgaccgctgcggacacggccgtgtattactgtgcgagagagggttactatgatagtagtggttattatcaccatgatgcttttgatatctggggccaagggacaatggtcaccgtctcttcag

SEQ ID NO: 9605 - DNA, 381 bp, Homo sapiens
gaggtgcagctggtggagtctgggggaggcttggtaaagcctggggggtcccttagactctcctgtgcagcctctggattcactttcagtaacgcctggatgagctgggtccgccaggctccagggaaggggctggagtgggttggccgtattaaaagcaaaactgatggtgggacaacagactacgctgcacccgtgaaaggcagattcaccatctcaagagatgattcaaaaaacacgctgtatctgcaaatgaacagcctgaaaaccgaggacacagccgtgtattactgtaccacggtgggagctacccacgtaagaccatactactactacggtatggacgtctggggccaagggaccacggtcaccgtctcctca

SEQ ID NO: 9606 - DNA, 381 bp, Homo sapiens
gaggtgcagctggtggagtctgggggaggcttggtacagcctggggggtccctgagactctcctgtgcagcctctggattcaccttcagtagctatagcatgaactgggtccgccaggctccagggaaggggctggagtgggttggccgtattaaaagcaaaactgatggtgggacaacagactacgctgcacccgtgaaaggcagattcaccatctcaagagatgattcaaaaaacacgctgtatctgcaaatgaacagcctgaaaaccgaggacacagccgtgtattactgtaccacggtgggagctacccacgtaagaccatactactactacggtatggacgtctggggccaagggaccacggtcaccgtctcctca

SEQ ID NO: 9607 - DNA, 376 bp, Homo sapiens
caggtgcagctggtggagtctgggggaggcttggtcaagcctggagggtccctgagactctcctgtgcagcctctggattcaccttcagtgactactacatgagctggatccgccaggctccagggaaggggctggagtgggtttcatacattagtagtagtagtagttacacaaactacgcagactctgtgaagggccgattcaccatctccagagacaacgccaagaactcactgtatctgcaaatgaacagcctgagagccgaggacacggctgtgtattactgtgcgagagattggagctactcagattactatgatagtagtggttattatccacactggggccagggaaccctggtcaccgtctcctcag

SEQ ID NO: 9608 - DNA, 376 bp, Homo sapiens; identical to SEQ ID NO: 9607

SEQ ID NO: 9609 - DNA, 362 bp, Homo sapiens
ggtgcaactggtggtgtctgggggcggcctggtcacgccgggggggtccctgagactctcctgtgcagtctctggattcaccttcagtatctatagcatgaactgggtccgccaggctccagggaaggggctggagtgggtctcatccattagtactggtagtaattacatctcgtatgcagactcagtgaagggccgattcaccatctccagagacaattccaagaacacgctgtatttggaagtgagcagcctgagaactgaggacacggctgtgtattactgtgcaagaactaacaatgggaactacaacggctactttgactactggggccagggaaccctggtcaccgtctcctcag

SEQ ID NO: 9610 - DNA, 364 bp, Homo sapiens
gaggtgcagctggtggagtctgggggaggcctggtcaagcctggggggtccctgagactctcctgtgcagcctctggattcaccttcagtagctatagtatgaactgggtccgccaggctccagggaaggggctggagtgggtctcattcattagtggcgatagtagttacatatactacgcagactcagtgaagggccgattcaccatctccagagacaattccaagaacacgctgtatttggaagtgagcagcctgagaactgaggacacggctgtgtattactgtgcaagaactaacaatgggaactacaacggctactttgactactggggccagggaaccctggtcaccgtctcctcag

SEQ ID NO: 9611 - DNA, 364 bp, Homo sapiens
caaatgcagctggtgcagtctgggcctgaagtgaagcagcctgggacctcagtgaaggtctcctgcaagacttctggattcacctttagtcactttgctgtgcagtgggtgcgacaggctcgtggacaacgccttgagtggataggatggatcgtcggtggcagtggtaacacaaactacgcacagaagttccaggaaagagtcaccatcaccagggacatgtccacaagcacagcctccatggagctgagcagcctgagatccgaggacacggccatatattactgtgcggcagaagggggaattgatagtagtggtttacacctattgtggggccagggaaccctggtcaccgtctcctcag

SEQ ID NO: 9612 - DNA, 364 bp, Homo sapiens
caaatgcagctggtgcagtctgggccagaggtgaagaagcctgggacctcagtgaaggtctcctgcaaggcttctggattcacctttactaattctgctgtgcagtgggtgcgacaggctcgcgcacaacgccttgagtggataggatggatcgtcgttggcagtggtaacacaaacttcgcacagaagttccaggacagagtcaccattaccagggacatgtccacaagcacagcctacatggagctgagcagcctgagatccgaggacacggccgtgtattactgtgcggcagaagggggaattgatagtagtggtttacagctattgtggggccagggaaccctggtcaccgtctcctcag

SEQ ID NO: 9613 - DNA, 364 bp, Homo sapiens
caggtgcagctggtggagtctgggggaggcttggtcaagcctggagggtccctgagactctcctgtgcagcctctggattcatcttcagtgactactccatgagttggatccgccaggctccagggaaggggctggagtgggtttcctacattagtagtagtggtagttccaaatacaacgcagacgttgtgaagggccgattcaccatctccagggacaacgccaagaattcactgtatctgcaaatgaacagcctgagagccgaggacacggccgtgtattactgtgcacgagatctaggcatattatggttcggggagaatgactactggggccagggaacactggtcaccgtctcctcag

SEQ ID NO: 9614 - DNA, 364 bp, Homo sapiens
caggtgcagctggtggagtctgggggaggcttggtcaagcctggagggtccctgagactctcctgtgcagcctctggattcaccttcagtgactcctacatgagctggatccgccaggctccagggaaggggctggagtgggtttcatacattagtagtagtggtagtaccatatactacgcagactctgtgaagggccgattcaccatctccagggacaacgccaagaactcactgtatctgcaactgaacagcctgagagccgaggacacggccgtgtattactgtgcgagagatctaggtatactctggttcggggagcatgactactggggccagggaaccctggtcaccgtctcctcag

SEQ ID NO: 9615 - DNA, 364 bp, Homo sapiens
caggtgcagctggtggagtctgggggaggcgtggtccagcctgggaggtccctgagactctcctgtgcagcctctggattcaccttcagtagctatgctatgcactgggtccgccaggctccaggcaaggggctggagtgggtggcagttatatcatatgatggaagtaataaatactacgcagactccgtgaagggccgattcaccatctccagagacaattccaagaacacgctgtatctgcaaatgaacagcctgagagctgaggacacggctgtgtattactgtgcgagacctcatagtgggagctactacgggggctttgactactggggccagggaaccctggtcaccgtctcctcag

SEQ ID NO: 9616 - DNA, 364 bp, Homo sapiens; identical to SEQ ID NO: 9615

SEQ ID NO: 9617 - DNA, 364 bp, Homo sapiens
caggtgcagttggtggagtctgggggaggcgtggtccagcctgggaggtccctgagactctcctgtgcagcctctggattcaccttcagtagttatggcatgcagtgggtccgccaggctccaggcaagggactggagtgggtggcagttatatcatatgatggaagtaatacatactatgcagagtccgtgaagggccgattcaccatctccagagacaattccaagaacacgctgtatgtgcaaatgaacagcctgagagctgaggacacggctgtctattactgtgcgagagatcacgcctgggggttcggctacgattttgactactggggccagggaatcctggtcaccgtctcctcag

SEQ ID NO: 9618 - DNA, 364 bp, Homo sapiens
caggtgcagttggtggagtctgggggaggcgtggtccagcctgggaggtccctgagactctcctgtgcagcctctggattcaccttcagtagttatggcatgcagtgggtccgccaggctccaggcaagggactggagtgggtggcagttatatcatatgatggaagtaatacatactatgcagagtccgtgaagggccgattcaccatctccagagacaattccaagaacacgctgtatctgcaaatgaacagcctgagagctgaggacacggctgtctattactgtgcgagagatcacgcctgggggttcggctacgattttgactactggggccagggaatcctggtcaccgtctcctcag

SEQ ID NO: 9619 - DNA, 364 bp, Homo sapiens
caggtgcagctggtggagtctgggggaggcgtggtccagcctgggaggtccctgagactctcctgtgcagcctctggattcaccttcagtagctatgccatacactgggtccgccaggctccaggcaaggggctggagtgggtgacagttatatcatatgatggaaggaataaatactgtgcagactccgtaaagggccgattcaccatctccagagacaattccaagaacacggtgtatctgcaaatgaacagcctgagagctgaggacacggctgtgtattactgtgcgagtggggctggcttagggatagactggtacctcgatctctggggccgtggcaccctgatcactgtctcctcag

SEQ ID NO: 9620 - DNA, 364 bp, Homo sapiens
caggtgcagctggtggagtctgggggaggcgtggtccagcctgggaggtccctgagactctcctgtgcagcctctggattcaccttcagtagctatggcatgcactgggtccgccaggctccaggcaaggggctggagtgggtgacagttatatcatatgatggaaggaataaatactgtgcagactccgttaagggccgattcaccatctccagagacaattccaagaacacggtgtatctgcaaatgaacagcctgagagctgaggacacggctgtgtattactgtgcgagtggggctggcttagggatagactggtacctcgatctctggggccgtggcaccctgatcactgtctcctcag

SEQ ID NO: 9621 - DNA, 364 bp, Homo sapiens
caggtccaactggtacagtctggggctgagatgaagaagcctggggcctcagtgaaggtctcctgcaaggtttccggatacaccctccctgaattatccatacactgggtgcgacaggctcctggaaaagggcttgagtggatgggaggttttaatcctgaagatggtgaaacaatctacgcacagaagttccagggcagagtcaccatgaccgaggacacatctacagacacagcgtacatggagctgagcagcctgggatctggggacacggccctgtatttctgtgcaacagccccaccagtgggaactataaactggttcgacccctggggccagggaaccctggtcaccgtctcctcag

SEQ ID NO: 9622 - DNA, 364 bp, Homo sapiens
caggtccagctggtgcagtctggggctgaggtgaggaagcctggggcctcagtgacggtctcttgcaaggtttccggatacaccctccctgaattatccatacactgggtgcgacaggctcctggagaagggctggagtggatgggaggttttaatcctgaagatggtgacacaatctatgcacagaaattccagggcagagtcaccatgaccgaagacacatctacagacacagcctacatggagctgagtgacctgagatctgaggacacggccctgtattattgtgcagcggccccaccagtgggaactataaactggttcgacccctggggccagggaaccctggtcaccgtctcctcag

SEQ ID NO: 9623 - DNA, 364 bp, Homo sapiens
caggtccagctggtacagtctggggctgaggtgaagaagcctggggcctcagtgaaggtctcctgcaaggtttccggatacaccctcactgaattatccatgcactgggtgcgacaggctcctggaaaagggcttgagtggatgggaggttttgatcctgaagatggtgaaacaatctacgcacagaagttccagggcagagtcaccatgaccgaggacacatctacagacacagcctacatggagctgagcagcctgagatctgaggacacggccgtgtattactgtgcaacagtgtttgctttcgggttgggccgaaggtttgactactggggccagggaaccctggtcaccgtctcctcag

SEQ ID NO: 9624 - DNA, 364 bp, Homo sapiens; identical to SEQ ID NO: 9623

SEQ ID NO: 9625 - DNA, 373 bp, Homo sapiens
caggtgcaactggtgcagtctggggctgaggtgaagaggcctggggcctcagtgaaggtctcctgcaaggcttctacatacaccttcaccggctactatatacactgggtgcgacaggcccctggacaagggcttgaggggatgggatggatcaaccctaccagtggtggcacaaactatccacagaggtttcagggcagggtcaccatgaccagggacacgtccatcagcacagcctacatggaactgagcagtctgagatctgacgacacggccgtttatttttgtgtgagagccgaccatggcgtgaatccaactggtgtgtacacatatgactattggggccagggaaccccggtcaccgtctcttcag

SEQ ID NO: 9626 - DNA, 373 bp, Homo sapiens; identical to SEQ ID NO: 9625

SEQ ID NO: 9627 - DNA, 355 bp, Homo sapiens
caggtgcagctggtggagtctgggggaggcttggtcaagcctggagggtccctgagactctcctgtgcagcctctggattcaccttcagtgactactacatgacctggatccgccaggctccagggaaggggctggagtgggtttcatacattagtagtagtagtagttacacaaactacgcagactctgtgaagggccgattcaccatctccagagacaacgccaagaactcactgtatctgcaaatgaacagcctgagagccgaggacacggctgtgtattactgtgcgagagatcccggagctactacggttgactactggggccagggaaccctggtcaccgtctcctcag

SEQ ID NO: 9628 - DNA, 355 bp, Homo sapiens; identical to SEQ ID NO: 9627

SEQ ID NO: 9629 - DNA, 349 bp, Homo sapiens
caggtgcagttggtggagtctgggggaggcgtggtccagcctgggaggtccctgagactctcctgtgtagcctctggattcaccttcatcagctatggcatgcactgggtccgccaggctccaggcaaggggctggagtgggtggcagttatatcatatgatggaagtgataaatactatgcagactccgtgaagggccgattcaccatctccagagacaattccaagaacacgctgtatctgcacatgaacagcctgagagctgaggacacggctgtgtattactgtgcgaaaatagcagtaaatgggggtcactggggccagggaaccctggtcaccgtctcctcag

SEQ ID NO: 9630 - DNA, 349 bp, Homo sapiens; identical to SEQ ID NO: 9629

SEQ ID NO: 9631 - DNA, 367 bp, Homo sapiens
caggtgcagctggtggagtctgggggaggcgtggtccagcctgggaggtccctgagactctcctgtgcagcctctggattcaccttcagtagctatggcatgcactgggtccgccaggctccaggcaaggggctggagtgggtggcagttatatcatatgatggaagtaataaatactatggagactccgtgaagggccgattcaccatctccagagacaattccaagaacacgctgtatctgcagatgaacagcctgagagctgaggacacggctgtatattattgtgcgaaagatctggctggatggttcggggagttatcctctgacaactggggccagggaaccctggtcaccgtctcctcag

SEQ ID NO: 9632 - DNA, 367 bp, Homo sapiens
caggtgcagttggtggagtctgggggaggcgtggtccagcctgggaggtccctgagactcacctgtgcagcctctggattcaccttcaggaactatggcatgcactgggtccgccaggctccaggcagggggctggagtgggtggcagttgtctcgtatgatggaaataataaatactatgtagactccgtgaagggccgattcaccatctccagagacaattccaagaacacactgtatctgcaaatgaacagcctgagagctgaggacacggctatgtattactgtgcgaaagatctggctggatggttcggggagttatcctctgactcctggggccagggaaccctggtcaccgtctcctcag

SEQ ID NO: 9633 - DNA, 345 bp, Homo sapiens
caggtgcagctacagcagtggggcgcaggactgttgaagccttcggagaccctgtccctcacctgcgctgtctatggtgggtccttcagtggttactactggaactggatccgccagcccccagggaaggggctggagtggattgcggagatcaatcaaagtggaagcaccaactacaacccgtccctcaagagtcgagtcaccatatcactagacacgtccaagaaccagttctccctggagctgacctctgtgaccgccgcggacacggctgtgtattactgtgcgagaggggggcaaggcatggacgtctggggccaagggaccacggtcaccgtctcctca

SEQ ID NO: 9634 - DNA, 345 bp, Homo sapiens
caggtgcagctacagcagtggggcgcaggactgttgaagccttcggagaccctgtccctcacctgcgctgtctatggtgggtccttcagtggttactactggaactggatccgccagcccccagggaaggggctggagtggattggggaaatcaatcaaagtggaagcaccaactacaacccgtccctcaagagtcgagtcaccatatcactagacacgtccaagaaccagttctccctggacctgacctctgtgaccgccgcggacacggctgtgtattactgtgcgagaggggggcaaggcatggacgtctggggccaagggaccacggtcaccgtctcctca

SEQ ID NO: 9635 - DNA, 337 bp, Homo sapiens
caggtgcagctgcaggagtcgggcccaggactggtgaagccgtcggagaccctgtccctcacgtgcactgtctctggtggctccatcagtagttactactggagctggatccggcagcccccagggaagggactggagtggattgggtatatctattacagtgggagcaccaactacaacccctccctcaagagtcgagtcaccatgtctttagacacgtccaagaaccagttctccctgaacctgacctctgtgaccgctgcggacacggccgtctattattgtgcgaggggatttgactactggggccagggaaccctggtcaccgtctcctcag

SEQ ID NO: 9636 - DNA, 337 bp, Homo sapiens
caggtgcagctgcaggagtcgggcccaggacgggtgaagccttcggagaccctgtccctcacctgcagtgtctctggtggctccatcagtagttactactggagctggatccggcagcccccagggaagggactggagtggattgggtacatctattacagtgggagcaccaagtacaactcttccctcaaaagtcgagtcaccatatcagtagacacgtccaaaaaccagttctccctgaagctgaggtctgtgaccgctgcggacacggccgtgtattactgtgcgagagggtttgactactggggccagggaactctggtcaccgtctcctcag

SEQ ID NO: 9637 - DNA, 118 bp, Homo sapiens
tcgtggaactcaggcgccctgaccagcggcgtgcacaccttcccggctgtcctacagtcctcaggactctactccctcagcagcgtggtgaccgtgccctccagcagcttgggcaccc

SEQ ID NO: 9638 - DNA, 118 bp, Homo sapiens; identical to SEQ ID NO: 9637

SEQ ID NO: 9639 - DNA, 367 bp, Homo sapiens
caggtgcagctggtgcagtctggggctgaggtgaagaagcctggggcctcagtgaaggtctcctgcaaggcttctggatacaccttcaccggctactatgtacactgggtgcgacaggcccctggacaagggcttgagtggatgggatggatcaaccctaacagtggtggcacaaactatgcacagaagtctcagggcagggtcaccatgaccagggacacgtccatcagcacagcctacatggagctgagcaggctgagatctgacgacacggccgtgtattactgtgcgagagactacggtgattacatacttttgtactactttgactactggggccagggaaccctggtcaccgtctcctcag

SEQ ID NO: 9640 - DNA, 367 bp, Homo sapiens
caggtgcagctggtgcagtctggggctgaggtgaagaagcctggggcctcagtgaaggtctcctgcaaggcttctggatacaccttcaccggccagtatatacacttggtgcgacaggcccctggacaagggcttgagtggatgggatggatcaaccctaacagtggtgccacaaactatgcacagaagtttcagggcagggtcaccatgaccagggacacgtccatcagcacagcctacatggagctgagcaggctgagatctgacgacacggccgtgtattactgtgcgagagactacggtgattacatacttttgtactactttgactactggggccagggaaccctggtcaccgtctcctcag

SEQ ID NO: 9641 - DNA, 364 bp, Homo sapiens
gaggtgcagctggtggagtctgggggaggcctggtcaagcctggggggtccctgagactctcctgtgcagcctctggattcaccttcagtagccatagcatgaactgggtccgccaggctccagggaaggggctggagtgggtctcatccatcactaggagtagtagttacatatactacgcagactcagtggagggccgattcaccatctccagagacaacgccaagaactcactgtatctgcagatgaacagcctgagagccgaggacacggctgtgtattactgtgcgagagcagatggctacaatttaccctactacggtatggacgtctggggccaagggaccacggtcaccgtctcct

SEQ ID NO: 9642 - DNA, 366 bp, Homo sapiens
gaggtgcagctggtggagtctgggggaggcctggtcaagcctggggggtccctgagactctcctgtgcagcctctggattcaccttcagtagctatagcatgaactgggtccgccaggctccagggaaggggctggagtgggtctcatccattagtagtagtagtagttacatatactacgcagactcagtgaagggccgattcaccatctccagagacaacgccaagaactcactgtatctgcaaatgaacagcctgagagccgaggacacggctgtgtattactgtgcgagagcagatggctacaatttaccctactacggtatggacgtctggggccaagggaccacggtcaccgtctcctca

SEQ ID NO: 9643 - DNA, 355 bp, Homo sapiens
caggtgcagctggtgcagtctggggctgaggtgaagaagcctggggcctcagtgaaggtctcctgcaaggcttctggatacaccttcaccagttatgatatcaactgggtgcgacaggccactggacaagggcttgagtggatgggatggatgaaccctaacagtggtaacacaggctatgcacagaagttccagggcagagtcaccatgaccaggaacacctccataagcacagcctacatggagctgagcagcctgagatctgaggacacggccgtgtattactgtgcgagaggcatggcagctggtgttagcctctactggggccagggaaccctggtcaccgtctcctcag

SEQ ID NO: 9644 - DNA, 355 bp, Homo sapiens
caggtgcagctggtgcagtctggggctgaggtgaagaagcctggggcctcagtgaaggtctcctgcaaggcttctggatacaccttcaccagttatgatatcaactgggtgcgacaggccactggacaagggcttgagtggatgggatggatgaaccctaacagtgggaacacaggctatgcacagaagttccagggcagagtcaccatgaccaggaacacctccataagcacagcctacatggagctgagcagcctgagatctgaggacacggccatatattactgtgcgagaggcatggcagctggtgttagcctctactggggccagggatccctggtcaccgtctcctcag

SEQ ID NO: 9645 - DNA, 373 bp, Homo sapiens
gaggtgcagctggtggagtctgggggaggcttggtccagcctggggggtccctgagactctcctgtgtagtctctggattcaccttcagtagccattggatgggttgggtccgccaggctccagggaaggggctggagtgggtggccaacataaaacaagatggaagtgagaagttccatgtggactctgtgaagggccgattcaccatctccagggacaacaccaagaattcactatatctgcaagtgaccagcctgagagtcgaggacacggccgtgtacttctgtgtgcgagaggggttgcgggggttttggagtggttctcactactttgacaactggggcctgggaaccctggtcaccgtctcctcag

SEQ ID NO: 9646 - DNA, 373 bp, Homo sapiens; identical to SEQ ID NO: 9645

SEQ ID NO: 9647 - DNA, 373 bp, Homo sapiens; identical to SEQ ID NO: 9645

SEQ ID NO: 9648 - DNA, 373 bp, Homo sapiens
gaggtgcagctggtggagtctgggggaggcttggtccagcctggggggtccctgagactctcctgtgcagcctctggattcaccttcagtagctatagcatgaactgggtccgccaggctccagggaaggggctggagtgggtggccaacataaaacaagatggaagtgagaagttccatgtggactctgtgaagggccgattcaccatctccagggacaacaccaagaattcactatatctgcagatgaccagcctgagagtcgaggacacggccgtgtacttctgtgtgcgagaggggttgcgggggttttggagtggttctcactactttgacaactggggcctgggaaccctggtcaccgtctcctcag

SEQ ID NO: 9649 - DNA, 373 bp, Homo sapiens
gaggtgcagctggtggagtctgggggaggcttggtccagcctggggggtccctgagactctcctgtgcagcctctggattcaccttcagtagctatagcatgaactgggtccgccaggctccagggaaggggctggagtgggtggccaacataaaacaagatggaagtgagaagttccatgtggactctgtgaagggccgattcaccatctccagggacaacaccaagaattcactatatctgcaagtgaccagcctgagagtcgaggacacggccgtgtacttctgtgtgcgagaggggttgcgggggttttggagtggttctcactactttgacaactggggcctgggaaccctggtcaccgtctcctcag

SEQ ID NO: 9650 - DNA, 373 bp, Homo sapiens
gaggtgcagctggtggagtctgggggaggcgtggtccagcctgggaggtccctgagactctcctgtgcagcctctggattcaccttcagtagctatagcatgaactgggtccgccaggctccagggaaggggctggagtgggtggccaacataaaacaagatggaagtgagaagttccatgtggactctgtgaagggccgattcaccatctccagggacaacaccaagaattcactatatctgcaagtgaccagcctgagagtcgaggacacggccgtgtacttctgtgtgcgagaggggttgcgggggttttggagtggttctcactactttgacaactggggcctgggaaccctggtcaccgtctcctcag

SEQ ID NO: 9651 - DNA, 373 bp, Homo sapiens
gaggtgcagctggtggagtctgggggaggcgtggtccagcctgggaggtccctgagactctcctgtgcagcctctggattcaccttcagtagctatagcatgaactgggtccgccaggctccagggaaggggctggagtgggtggccaacataaaacaagatggaagtgagaagttccatgtggactctgtgaagggccgattcaccatctccagggacaacaccaagaattcactatatctgcagatgaccagcctgagagtcgaggacacggccgtgtacttctgtgtgcgagaggggttgcgggggttttggagtggttctcactactttgacaactggggcctgggaaccctggtcaccgtctcctcag

SEQ ID NO: 9652 - DNA, 373 bp, Homo sapiens; identical to SEQ ID NO: 9645

SEQ ID NO: 9653 - DNA, 373 bp, Homo sapiens
gaggtgcagctggtggagtctggggggggcttggtccagcctggggggtccctgagcctctcctgtgtagtctctggattcaccttcagtagccattggatgggttgggtccgccaggctccagggaaggggctggagtgggtggccaacataaaacaagatggaagtgagaagttccatgtggactctgtgaagggccgattcaccatctccagggacaacaccaagaattcactatatctgcaagtgaccagcctgagagtcgaggacacggccgtgtacttctgtgtgcgagaggggttgcgggggttttggagtggttctcactactttgacaactggggcctgggaaccctggtcaccgtctcctcag

SEQ ID NO: 9654 - DNA, 373 bp, Homo sapiens; identical to SEQ ID NO: 9645

SEQ ID NO: 9655 - DNA, 373 bp, Homo sapiens; identical to SEQ ID NO: 9650

SEQ ID NO: 9656 - DNA, 373 bp, Homo sapiens
gaggtgcagctggtggagtctgggggaggcttggtccagcctggggggtccctgagactctcctgtgtagtctctggattcaccttcagtagccattggatgggttgggtccgccaggctccagggaaggggctggagtgggtggccaacataaaacaagatggaagtgagaagttccatgtggactctgtgaagggccgattcaccatctccagggacaacaccaagaattcactatatctgcagatgaccagcctgagagtcgaggacacggccgtgtacttctgtgtgcgagaggggttgcgggggttttggagtggttctcactactttgacaactggggcctgggaaccctggtcaccgtctcctcag

SEQ ID NO: 9657 - DNA, 373 bp, Homo sapiens; identical to SEQ ID NO: 9651

SEQ ID NO: 9658 - DNA, 373 bp, Homo sapiens; identical to SEQ ID NO: 9656

SEQ ID NO: 9659 - DNA, 373 bp, Homo sapiens
gaggtgcagctggtggagtctgggggaggcttggtccagcctggggggtccctgagactctcctgtgcagcgtctggattcattttcagtacctttagcatgaattgggtccgccaggctccagggaaggggctggagtgggtggccaacataaaacaagatggaagtgagaagttccatgtggactctgtgaagggccgattcaccatctccagggacaacaccaagaattcactatatctgcagatgaccagcctgagagtcgaggacacggccgtgtacttctgtgtgcgagaggggttgcgggggttttggagtggttctcactactttgacaactggggcctgggaaccctggtcaccgtctcctcag

SEQ ID NO: 9660 - DNA, 364 bp, Homo sapiens
caggtgcagctggtggagtctgggggaggcgtggtccagcctgggaggtccctgagactctcctgtgcagcctctggattcacctttagtagctatgttatgtattgggtccgccaggctccaggcaaggggctggactgggtggcaattatatcatatgatggaagtaataaatactacgcagactccgtgaagggccgattcaccatctccagagacaattccaagaacacgctgtatttggaagtgagcagcctgagaactgaggacacggctgtgtattactgtgcaagaactaacaatgggaactacaacggctactttgactactggggccagggaaccctggtcaccgtctcctcag

SEQ ID NO: 9661 - DNA, 364 bp, Homo sapiens; identical to SEQ ID NO: 9660

SEQ ID NO: 9662 - DNA, 364 bp, Homo sapiens; identical to SEQ ID NO: 9660

SEQ ID NO: 9663 - DNA, 364 bp, Homo sapiens
caggtgcagctggtggagtctgggggaggcgtggtccagcctgggaggtccctgagactctcctgtgcagcctctggattcacctttagtagctatgttatgtattgggtccgccaggctccaggcaaggggctggactgggtggcaattatatcatatgatggaagtaatacatactacgcagactccgtgaagggccgattcaccatctccagagacaattccaagaacacggtgtatttggaagtgagcagcctgagaactgaggacacggctgtatattactgtgcaagaactaacagtgggaactacaacggctactttgactactggggccagggaaccctggtcaccgtctcctcag

SEQ ID NO: 9664 - DNA, 364 bp, Homo sapiens; identical to SEQ ID NO: 9660

SEQ ID NO: 9665 - DNA, 364 bp, Homo sapiens; identical to SEQ ID NO: 9660

SEQ ID NO: 9666 - DNA, 364 bp, Homo sapiens
caggtgcaactggtggagtctgggggaggcgtggtccagccagggaggtccctgagactctcctgtgcagcctctgggttcagctttagtacctatgctatgtattgggtccgccaggctccaggcaaggggctggactgggtggcgattatttcatatgatggaagtaataaatattacgcagactccgtgaagggccgattcaccatctccagagacaattccaagaacacgctgtatttggaagtgagcagcctgacaactgaggacacggctgtctattactgtgcaagaactaacagtgggaactacaactcctactttgactactggggccagggaaccctggtcaccgtctcctcag

SEQ ID NO: 9667 - DNA, 364 bp, Homo sapiens; identical to SEQ ID NO: 9660

SEQ ID NO: 9668 - DNA, 364 bp, Homo sapiens
caggtgcagctggtggagtctgggggaggcgtggtccagcctgggaggtccctgagactctcctgtgcagcctctggattcacctttagtagttatgttatgtattgggtccgccaggctccaggcaaggggctggactgggtggcaattatatcatatgatggcagtaataaatactacgcagactccgtgaagggccgattcaccatctccagagacaattccaagaacacgctgtatttggaagtgagcagcctgagaactgaggacacggctgtgtattactgtgcaagaactaacaatgggaactacaacggctactttgactactggggccagggaaccctggtcaccgtctcctcag

SEQ ID NO: 9669 - DNA, 364 bp, Homo sapiens; identical to SEQ ID NO: 9660

SEQ ID NO: 9670 - DNA, 364 bp, Homo sapiens
caggtgcagctggtggagtctgggggaggcgtggtccagcctgggaggtccctgagactctcctgtgcagcctctggattcaccttcagtagctatgccatgcactgggtccgccaggctccaggcaaggggctggagtgggtggcagttatatcatatgatggaagtaataaatactatccagactccgtgaagggccgattcaccatctccagagacaattccaagaacacgctgtatttggaagtgagcagcctgagaactgaggacacggctgtgtattactgtgcaagaactaacaatgggaactacaacggctactttgactactggggccagggaaccctggtcaccgtctcctcag

SEQ ID NO: 9671 - DNA, 364 bp, Homo sapiens; identical to SEQ ID NO: 9660

SEQ ID NO: 9672 - DNA, 364 bp, Homo sapiens; identical to SEQ ID NO: 9660

SEQ ID NO: 9673 - DNA, 364 bp, Homo sapiens; identical to SEQ ID NO: 9660

SEQ ID NO: 9674 - DNA, 367 bp, Homo sapiens
cagctgcagctgcaggagtcgggcccaggactggtgaagccttcggagaccctgtccctcacctgcactgtctctggtggctccatccgcagtagtaattactactggggctggatccgccagcccccagggaaggaactggagtggattgggagtatctattatagtgggaccagctactacaacccgtccctcaagagtcgagtcaccatttccgtagacacgtccaagaaccagttctccctgaagctgagctctgtgaccgccgcagacacggctgtctattactgtgcgggcggatataccaccagctggtactggtacttcgatctctggggccgtggcaccctggtcactgtctccccag

SEQ ID NO: 9675 - DNA, 367 bp, Homo sapiens
cagctgcagctgcaggagtcgggcccaggactggtgaagccttcggagaccctgtccctcacctgcactgtctctggtggctccatccgcagtagtagttactactggggctggatccgccagcccccagggaagggactggagtggattgggagtatctattatagtgggaccacctactacaacccgtccctcaagagtcgagtcaccatatccgtagacacgtccaagaaccagttctccctgaacctgagctctgtgaccgccgcagacacggctgtgtattactgtgcgggcgggtataccaccagctggtactggtacttcggtctctggggccgtggcaccctggtcactgtctcctcag

SEQ ID NO: 9676 - DNA, 367 bp, Homo sapiens; identical to SEQ ID NO: 9674

SEQ ID NO: 9677 - DNA, 367 bp, Homo sapiens; identical to SEQ ID NO: 9674

SEQ ID NO: 9678 - DNA, 367 bp, Homo sapiens
cagctgcagctgcaggagtcgggcccaggactggtgaagccttcggagaccctgtccctcacctgcactgtctctggtggctccatccgcagtagtagttactactggggctggatccgccagcccccagggaaggggctggagtggattgggagtatctattatagtgggaccacctactacaacccgtccctcaagagtcgagtcaccatatccgtagacacgtccaagaaccagttctccctgaacctgagctctgtgaccgccgcagacacggctgtgtattactgtgcgggcgggtataccaccagctggtactggtacttcggtctctggggccgtggcaccctggtcactgtctcctcag

SEQ ID NO: 9679 - DNA, 367 bp, Homo sapiens; identical to SEQ ID NO: 9674

SEQ ID NO: 9680 - DNA, 367 bp, Homo sapiens
cagctgcagctgcaggagtcgggcccaggactggtgaagccttcggagaccctgtccctcacctgcactgtctctggtggctccatccgcagtagtaattactactggggcttgatccgccagcccccagggaaggaactggagtggattgggagtatctattatagtgggaccaactactacaacccgtccctcaagagtcgagtcaccatttccgtagacacgtccaagaaccagttctccctgaagctgaactctgtgaccgccgcagacacggctgtctattactgtgcgggcggatataccaccagttggtactggtacttcgatctctggggccgtggcaccctggtcactgtctccccag

SEQ ID NO: 9681 - DNA, 367 bp, Homo sapiens
cagctgcagctgcaggagtcgggcccaggactggtgaagccttcggagaccctgtccctcacctgcactgtctctggtggctccatccgcagtagtagttactactggggctggatccgccagcccccagggaagggactggagtggattgggagtatctactatagtgggaccacctactacaacccgtccctcaagagtcgagtcaccatatccgtagacacgtccaagaaccagttctccctgaagctgagctctgtgaccgccgcagacacggctgtctattactgtgcgggcgggtataccaccagctggtactggtacttcgctctctggggccgtggcaccctagtcactgtctcctcag

SEQ ID NO: 9682 - DNA, 367 bp, Homo sapiens; identical to SEQ ID NO: 9678

SEQ ID NO: 9683 - DNA, 367 bp, Homo sapiens; identical to SEQ ID NO: 9678

SEQ ID NO: 9684 - DNA, 367 bp, Homo sapiens; identical to SEQ ID NO: 9678

SEQ ID NO: 9685 - DNA, 367 bp, Homo sapiens
cagctgcagctgcaggagtcgggcccaggactggtgaagccttcggagaccctgtccctcacctgcactgtctctggtggctccatccgcagtagtaattactactggggctggatccgccagcccccagggaaggaactggagtggattgggagtatctattatagtgggaccaactactacaacccgtccctcaagagtcgagtcaccatttccgtagacacgtccaagaaccagttctccctgaagctgagctctgtgaccgccgcagacacggctgtctattactgtgcgggcggatataccaccagctggtactggtacttcgatctctggggccgtggcaccctggtcactgtctccccag

SEQ ID NO: 9686 - DNA, 367 bp, Homo sapiens
cagctgcagctgcaggagtcgggcccaggactggtgaagccttcggagaccctgtccctcacctgcactgtctctggtggctccatccgcagtagtaattactactggggctggatccgccagcccccagggaaggaactggagtggattgggagtatctattatagtgggaccacctactacaacccgtccctcaagagtcgagtcaccatttccgtagacacgtccaagaaccagttctccctgaagctgagctctgtgaccgccgcagacacggctgtctattactgtgcgggcgggtataccaccagctggtactggtacttcggtctctggggccgtggcaccctggtcactgtctccccag

SEQ ID NO: 9687 - DNA, 367 bp, Homo sapiens; identical to SEQ ID NO: 9674

SEQ ID NO: 9688 - DNA, 244 bp, Homo sapiens
agctttggcatggaatcattcctccaagtccattaacaagggctggggcctgagcagccagtcggcccggcagcagaagccacgcatcccagctctgggtagtccggggagacccaaagcccaggccgggcctggcagccaccctcccagagcctccgctaggccagtcctgctgacgccgcatcggtgattcggaacagaatctgtccttctaaggtgtctccacagtcctgtcttcagcact

SEQ ID NO: 9689 - DNA, 244 bp, Homo sapiens; identical to SEQ ID NO: 9688

SEQ ID NO: 9690 - DNA, 244 bp, Homo sapiens; identical to SEQ ID NO: 9688

SEQ ID NO: 9691 - DNA, 244 bp, Homo sapiens; identical to SEQ ID NO: 9688

SEQ ID NO: 9692 - DNA, 244 bp, Homo sapiens; identical to SEQ ID NO: 9688

SEQ ID NO: 9693 - DNA, 244 bp, Homo sapiens; identical to SEQ ID NO: 9688

SEQ ID NO: 9694 - DNA, 244 bp, Homo sapiens; identical to SEQ ID NO: 9688

SEQ ID NO: 9695 - DNA, 244 bp, Homo sapiens; identical to SEQ ID NO: 9688

SEQ ID NO: 9696 - DNA, 244 bp, Homo sapiens; identical to SEQ ID NO: 9688

SEQ ID NO: 9697 - DNA, 244 bp, Homo sapiens; identical to SEQ ID NO: 9688

SEQ ID NO: 9698 - DNA, 244 bp, Homo sapiens; identical to SEQ ID NO: 9688

SEQ ID NO: 9699 - DNA, 244 bp, Homo sapiens; identical to SEQ ID NO: 9688

SEQ ID NO: 9700 - DNA, 367 bp, Homo sapiens
caggtgcagctggtgcagtctggggctgaggtgaagaagcctggggcctcagtgaaggtttcctgcaaggcatctggatacaccttcaccagctactatatgcactgggtgcgacaggcccctggacaagggcttgaatggatgggaataatcaaccctagtggtggtagcacaagctacgcacagaagttccatggcagagtcaccatgaccagtgacacgtccacgagcacagtctacatggagctgagcagcctgagatctgaggacacggccgtgtattactgtgcgagggatcttgtagttgtaccagctgctatgggacttgactactggggccagggaaccctggtcaccgtctcctcag

SEQ ID NO: 9701 - DNA, 367 bp, Homo sapiens
caggtgcagctgcaggagtcgggcccaggactggtgaagccttcggagaccctgtccctcacctgcactgtctctggttactccatgggaagcggtaactactggggctggacccggcagcccccagggaaggggctggagtggattgggagtatctatgatcgagggagcatctactacaacccgtccctcaagagtcgagtcaccatatcagtagacacgtccaagaaccagttctccctgaagctgagttctgtgaccgccgcagacacggccgtgttttactgtgcgagaataataagttcccgtggatatagtggctacgtcgcaacttggggccagggaaccctggtcaccgtctcctcag

SEQ ID NO: 9702 - DNA, 367 bp, Homo sapiens
gaggtgcagctggtggagtctggaggaggcttgatccagcctggggggtccctgagactctcctgtgcagcctctgggttcaccgtcagtagcaactacatgagctgggtccgccaggctccagggaaggggctggagtgggtctcacttatttatagcggtggtagcacatactacgcagactccgtgaagggccgattcaccatctccagagacaattccaagaacacgctgtatcttcaaatgaacagcctgagagccgaggacacggccgtgtattattgtgcgagaatgcggtttggggcagtggctggtattgagtggttcgacccctggggccagggaaccctggtcaccgtctcctcag

SEQ ID NO: 9703 - DNA, 367 bp, Homo sapiens
gaggtgcagctggtggagtctggaggaggcttgatccagcctggggggtccctgagactctcctgtgcagcctctgggttcaccgtcagtagcaactacatgagctgggtccgccaggctccagggaaggggctggagtgggtctcagttatttatagcggtggtagcacatactacgcagactccgtgaagggccgattcaccatctccagagacaattccaagaacacgctgtatcttcaaatgaacagcctgagagccgaggacacggccgtgtattactgtgcgagaatgcggtttggggcagtggctggtactgactggttcgacccctggggccagggaaccctggtcaccgtctcctcag

SEQ ID NO: 9704 - DNA, 370 bp, Homo sapiens
gaggtgcagctggtgcagtctggagcagaggtgaaaaagcccggggagtctctgaagatctcctgtaagggttctggatacaactttaccaactactggatcggctgggtgcgccagatgcccgggaaaggcctggagtggatgggaatcatctatcctggtgactctgataccagatacagcccgtccttccaaggccaggtcaccatctcagccgacaagtccatcagcaccgcctacctgcagtggagcagcctgaaggcctcggacaccgccatgtattactgtgcgagacgaaattatgatatttggactggcttggtcgcgttcgacccctggggccagggaaccctggtcaccgtctcctcag

SEQ ID NO: 9705 - DNA, 370 bp, Homo sapiens
caggtgcagctggtggagtctgggggaggcttggtcaaacctggagggtccctgagactctcctgtgcagcctctggattcaccttcagtgactactacatgagttggatccgccaggctccagggaaggggctggagtgggtttcatacattagtagtagtggtagtaccatgtactacgcagactctgtgaagggccgattcaccatctccagggacaacgccatgaagtcactgtatctacaaatgaacagcctgagagccgaggacacggccgtgtattactgtgcgagggatctgtggttcgggcgatatacggggagctggttcgacccctggggccagggaaccctggtcaccgtctcctcag

SEQ ID NO: 9706 - DNA, 370 bp, Homo sapiens
caggtccagttggtacagtctggggctgaggtgaagaagcctggggcctcagtgaaggtctcctgcaaggtttccggatacaccctcattgaattatccatgcactgggtgcgacaggctcctggaaaggggcttgagtggatgggaggttttgatcctgaagatggtgaaacaatctacgcacagaagttccagggcagagtcaccatgaccgaggacacatctacagacacagcctacatggagctgagcagcctgagatctgaggacacggccgtgtattactgtgcaacttcaccagctgctgtgccatcgcccatgggctggttcgacccctggggccagggaaccctggtcaccgtctcctcag

SEQ ID NO: 9707 - DNA, 358 bp, Homo sapiens
caggtgcagctgcaggagtcgggcccaggactggtgaagccttcacagaccctgtccctcacctgcactgtctctggtggctccatcagcagtggtggttactactggagctggatccgccagcacccagggaagggcctggagtggattgggtacatctattacagtgggagcacctactacaacccgtccctcaagagtcgagttaccatatcagtagacacgtctaagaaccagttctccctgaagctgagctctgtgactgccgcggacacggccgtgtattactgtgcgagagcccctactactactctctttgactactggggccagggaaccctggtcaccgtctcctcag

SEQ ID NO: 9708 - DNA, 373 bp, Homo sapiens
cagctgcagctgcaggagtcgggcccaggactggtgaagccttcggagaccctgtccctcacctgcactgtctctggtggttccatcagtagtactagtcactactggggctggatccgccagcccccagggaaggggctggagtggattgggaatatctattatactgggaccacctactacaacccgtccctcaagagtcgagtcaccgtctccgtagacacgtccaagaaccagttctccctgaagctgagctctgtgaccgccgcagacacggctgtgtacttctgtgcgagacaggggggtgatgactacagtgactacgactggttcgacccctggggccagggaaccctggtcaccgtctcctcag

SEQ ID NO: 9709 - DNA, 373 bp, Homo sapiens
cagctgcagctgcaggagtcgggcccaggactggtgaagccttcggagaccctgtccctcacctgcactgtctctggtggctccatcagcagtagtagttactactggggctggatccgccagcccccagggaaggggctggagtggattgggagtatctattatagtgggagcacctactacaacccgtccctcaagagtcgagtcaccatatccgtagacacgtccaagaaccagttctccctgaagctgagctctgtgaccgccgcagacacggctgtgtattactgtgcgagacgtctgtcagggccgtatagcaccggggggtggttcgacccctggggccagggaaccctggtcaccgtctcctcag

SEQ ID NO: 9710 - DNA, 373 bp, Homo sapiens
caggtgcagctgcaggagtcgggcccaggactggtgaagccttcacagaccctgtccctcacctgcactgtctctggtggctccatcagcagtggtggttactactggagctggatccgccagcacccagggaagggcctggagtggattgggtacatctattacagtgggagcacctactacaacccgtccctcaagagtcgagttaccatatcagtagacacgtctaagaaccagttctccctgaagctgagctctgtgactgccgcggacacggccgtgtattactgtgcgagatctacttggagtggttatttagagagtaactggttcgacccctggggccagggaaccctggtcaccgtctcctcag

SEQ ID NO: 9711 - DNA, 367 bp, Homo sapiens
caggtgcagctgcaggagtcgggcccaggactggtgaagccttcggagaccctgtccctcacctgcagtgtctctggtgtctccatcactacttactactggagctggatccggcagcccgccgggaagggactggagtggattgggcgtgtctataccagcgggagcaccaattacaatccctccctcaagagtcgagtcaccatgtcggtagacacgtccgagaatcagttctccctgaggctgaagtctgttactgccgcggacacggccgtgtattattgtgcgagagagagaggggacccagctatagcagcagccccgttcgacccctggggcccgggaaccctggtcaccgtctcgtcag

SEQ ID NO: 9712 - DNA, 373 bp, Homo sapiens
gaggtgcagctggtggagtctgggggaggcttggtaaagccagggcggtccctgagactctcctgtacagcttctggattcacctttggtgattatgctatgagctggttccgccaggctccagggaaggggctggagtgggtaggcttcattagaagcaaagcttatggtgggacaacagaatacgccgcgtctgtgaaaggcagactcaccatctcaagagatgattccaaaagcatcgcctatctgcaaatgaacagcctgaaaaccgaggacacagccgtgtattactgtaccattaacttacgtgcctatggttcggggagttatggtgactactggggccagggaaccctggtcaccgtctcctcag

SEQ ID NO: 9713 - DNA, 370 bp, Homo sapiens
cagctgcagctgcaggagtcgggcccaggactggtgaagccttcggagaccctgtccctcatctgctctgtctctggtggctccatcagcaccagtacttcctactggggctggatccgccagcccccagggaaggggctggagtggattgggaataagtattataatggtaacacctactacagtccgtccctcaagagtcgagtcaccatatccatagacacgtccaagagccagttctccctgaagttgagctctgtgaccgccgcagacacggctgtctattactgtgcgaggacaactgatgtttcagtggtaccacctgggatggaccagtggggccagggtaccctggtcaccgtctcctcag

SEQ ID NO: 9714 - DNA, 370 bp, Homo sapiens
cagctgcagctgcaggagtcgggcccaggactggtgaagccttcggagaccctgtccctcacctgcactgtctctggtggctccatcagcagtagtagttactactggggctggatccgccagcccccagggaaggggctggagtggattgggagtatctattatagtgggagcacctactacaacccgtccctcaagagtcgagtcaccatatccgtagacacgtccaagaaccagttctccctgaagctgagctctgtgaccgccgcagacacggctgtgtattactgtgcgaggaacatactatggttcggggagtttaactggttcgacccctggggccagggaaccctggtcaccgtctcctcag

SEQ ID NO: 9715 - DNA, 370 bp, Homo sapiens
cagctgcagctgcaggagtcgggcccaggactggtgaagccttcggagaccctgtccctcacctgcactgtctctggtggctccatcagcagtagtagttactactggggctggatccgccagcccccagggaaggggctggagtggattgggagtatctattatagtgggagcacctactacaacccgtccctcaagagtcgagtcaccatatccgtagacacgtccaagaaccagttctccctgaagctgagctctgtgaccgccgcagacacggctgtgtattactgtgcgagactggggctccgatattactatggtttgggccgggactactggggccagggaaccctggtcaccgtctcctcag

SEQ ID NO: 9716 - DNA, 370 bp, Homo sapiens
cagctgcagctgcaggagtcgggcccaggactggtgaagccttcggagaccctgtccctcacctgcactgtctctggtggctccatcagcagtaggagttactactggggctggatccgccagcccccagggaaggggctagaatggtttgggagtatctattatagtgggaccgcctactacaacccgtccctcaagagtcgagtcaccatatccgtagacacgtccaagaaccagttctccctgaagctgacctctgtgaccgccgcagacacggctgtgtattactgtgcgagacaaaagatcgaactactaggggggggctactttgactactggggccagggaaccctggtcaccgtctcctcag

SEQ ID NO: 9717 - DNA, 370 bp, Homo sapiens
caggtgcagctggtggagtctgggggaggcgtggtccagcctgggaggtccctgagactctcctgtgcagcctctggattcaccttcagtagctatggcatgcactgggtccgccaggctccaggcaaggggctggagtgggtggcagttatatcatatgatggaagtaataaatactatgcagactccgtgaagggccgattcaccatctccagagacaattccaagaacacgctgtatctgcaaatgaacagcctgagagctgaggacacggctgtgtattactgtgcgaaaaacggatacagttatggttatagagtgtactactttgactactggggccagggaaccctggtcaccgtctcctcag

SEQ ID NO: 9718 - DNA, 373 bp, Homo sapiens
caggtgcagctgcaggagtcgggcccaggactggtgaagccttcggagaccctgtccctcacctgcactgtctctggtggctccgtcagcagtggtagttactactggagctggatccggcagcccccagggaagggactggagtggattgggtatatctattacagtgggagcaccaactacaacccctccctcaagagtcgagtcaccatatcagtagacacgtccaagaaccagttctccctgaagctgagctctgtgaccgctgcggacacggccgtgtattactgtgcgagagggccttattactatgatagtagtggttattacgaagactactggggccagggaaccctggtcaccgtctcctcag

SEQ ID NO: 9719 - DNA, 370 bp, Homo sapiens
caggtccagctggtacagtctggggctgaggtgaagaagcctggggcctcagtgaaggtctcctgcaaggtttccggatacaccctcactgaattatccatgcactgggtgcgacaggctcctggaaaagggcttgagtggatgggaggttttgatcctgaagatggtgaaacaatctacgcacagaagttccagggcagagtcaccatgaccgaggacacatctacagacacagcctacatggagctgagcagcctgagatctgaggacacggccgtgtattactgtgcaacagcctattcagtatatggagtggccggtacccactttgactactggggccagggaaccctggtcaccgtctcctcag

SEQ ID NO: 9720 - DNA, 370 bp, Homo sapiens
caggtccagctggtacagtctggggctgaggtgaagaagcctggggcctcagtgaaggtctcctgcaaggtttccggatacaccctccctgaattatccatgcactgggtgcgacaggctcctggaaaagggcttgagtggatgggaggttttgatcctgaagatggtgaaacaatctacgcagagaagttccagggcagagtcaccatgaccgaggacacatctacagacacagcctacatggaattgagcagcctgagatctgaggacacggccctgtattactgtgcaacagcctatgcagtatatggactggccggtacccactttgactactggggccagggaaccctggtcaccgtctcctcag

SEQ ID NO: 9721 - DNA, 370 bp, Homo sapiens
caggtccagctggtacagtctggggctgaggtgaagaagcctggggcctcagtgaaggtctcctgcaaggtttccggatacaccctcactgaattatccatgcactgggtgcgacaggctcctggaaaagggcttgagtggatgggaggttttgatcctgaagatggtgaaacaatctacgcacagaagttccagggcagagtcaccatgaccgaggacacatctacagacacagcctacatggagctgagcagcctgagatctgaggacacggccgtgtattactgtgcaacagatttcagtattactatggttcggggagcaacctttgactactggggccagggaaccctggtcaccgtctcctcag

SEQ ID NO: 9722 - DNA, 366 bp, Homo sapiens
gaggtgcagctggtggagtctgggggaggcttggtacagcctggggggtccctgagactctcctgtgcagcctctggattcaccttcagtagttatagcatgagctgggtccgccaggctccagggaaggggctggagtgggtttcatacattggtagtagtggtagtaccatatactacgcagactctgtgaagggccgattcaccatctccagagacaatgccaagaactcactgtatctgcaaatgaacagcctgagagacgacgacacggctgtgtattactgtgcgagaaacgactaccccaactactactactacggtatggacgtctggggccaagggaccacggtcaccgtctcctca

SEQ ID NO: 9723 - DNA, 370 bp, Homo sapiens
caggtgcagctggtgcagtctggggctgaggtgaagaagcctgggtcctcggtgaaggtctcctgcaaggcttctggaggcaccttcagcagctatgctatcagctgggtgcgacaggcccctggacaagggcttgagtggatgggagggatcatccctatctttactacagcaaactacgcacagaagttccagggcagagtcacgattaccgcggacgaatccacgagcacagcctacatggagctgagcagcctgagatctgaagacacggccatatattactgtgcgagagcggccagtggtagctgctacttcggttgtagctttgactactggggccagggaaccctggtcaccgtctcctcag

SEQ ID NO: 9724 - DNA, 370 bp, Homo sapiens
caggttcagctggtgcagtctggggctgaggtgaagaagcgtgggtccccggtgaaggtctcctgcaaggcttctggaggcaccttcagcagctatggtatcagctgggtgcgacaggcccctggacaagggcttgagtggatgggagggatcatccctatctttggtacagcaaactacgcacagaagttccagggcagagtcacgattaccgcggacgaatccacgagcacagcctacatggagctgagcagcctgagatctgaggacacggccgtgtattactgtgcgcgatttgtctatgatagtggtggttattactccgggcctgactactggggccagggaacgctggtcaccgtctcctcag

SEQ ID NO: 9725 - DNA, 370 bp, Homo sapiens
gaagtgcagctggtggagtctgggggaggcttggtacagcctggcgggtccctgagactctcctgtgcagcctctggattcaactttgatgactatgccatgcactgggtccggcaacctccagggaagggcctggagtgggtctcaggtattagttggaatagtggtagcatagactatggggactctgtgaagggccgattcaccatctccagagacaacgccaagaactccctgtatctgcaaatgaacagtctgagacctgaggacacggccttgtattactgtgtaaaagacagagagatggcaacagagatcggagagtactttgactactggggccagggaaccctggtcaccgtctcctcag

SEQ ID NO: 9726 - DNA, 370 bp, Homo sapiens
gaagtgcagctggtggagtctgggggaggcttggtacagcctggcaggtccctgagactctcctgtgcagcctctggattcacctttgaagattatgccatgcactgggtccggcaagctccagggaagggcctggagtgggtctcaggtcttagttggaatagcggtaccataggctatgcggactctgtgaagggccgattcattatctccagagacaacgccaagaactccctgtatctgcaaatgaggagtctgagagctgaggacacggcgttgtattactgtgcaaaagatataggcggggggagtggctacgatttccctattgactactggggccagggaaccctggtcaccgtctcctcag

SEQ ID NO: 9727 - DNA, 370 bp, Homo sapiens
gaagtgcagctggtggagtcggggggaggcttggtccagcctggcaggtccctgagactctcctgtgcagcctctggattcacctttgatgattatgtcatgcactgggtccggcaagctccagggaagggcctggagtgggtctcaggtattagttggaatggtggtatcataggttctgcggactctgtgaagggccgattcaccatctccagagacaacgccaagagctccctatatctgcaaatgaacaatctgagacctgaggacacggcctcgtattactgtgcaaaagataaggattccgccgactatagcagtggctgtattgactactggggccagggaaccctggtcaccgtctcctcag

SEQ ID NO: 9728 - DNA, 367 bp, Homo sapiens
caggtgcagctgcaggagtcgggcccaggactggtgaagccttcggagaccctgtccctcacctgcactgtctctggtggctccatcagtagttactactggagctggatccggcagcccccagggaagggactggagtggattgggtatatctattacagtgggagcaccaactacaacccctccctcaagagtcgagtcaccatatcagtagacacgtccaagaaccagttctccctgaagctgagctctgtgaccgctgcggacacggccgtgtattactgtgcgagagaacccgggtatagcagcagctggtggtactactttgactactggggccagggaaccctggtcaccgtctcctcag

SEQ ID NO: 9729 - DNA, 367 bp, Homo sapiens
caggtgcagctgcaggagtcgggcccaggactggtgaagccttcggagaccctgtccctcacctgcactgtctctggtggctccatcagtagttactactggagctggatccggcagcccccagggaagggactggagtggattgggtatatctattacagtgggagcaccaactacaacccctccctcaagagtcgagtcaccatatcagtagacacgtccaagaaccagttctccctgaagctgagctctgtgaccgctgcggacacggccgtgtattactgtgcgagatggcccgcggatacagctatgggcaaacatcgcggtgactactggggccagggaaccctggtcaccgtctcctcag

SEQ ID NO: 9730 - DNA, 367 bp, Homo sapiens
caggtgcagctgcaggagtcgggcccaggactggtgaagccttcacagaccctgtccctcacctgcactgtctctggtggctccgtcagtagttactactggagctggatccggcagcccccagggaagggactggagtggattgggtatatctattacagtgggagcaccaactacaacccctccctcaagagtcgagtcaccatatcagtagacacgtccaagaaccagttctccctgaagctgagctctgtgaccgccgcggacacggctgtatattactgtgcgagaggatgggggtatagcagcagctggtacggtctctttgactactggggccagggaaccctggtcaccgtctcctcag

SEQ ID NO: 9731 - DNA, 367 bp, Homo sapiens
caggtgcagctgcaggagtcgggcccaggactggtgaagccttcggagaccctgtccctcacctgcactgtctctggtggctccatcagtagttactactggagctggatccggcagcccccagggaagggactggagtggattgggtatatctattacagtgggagcaccaactacaacccctccctcaagagtcgagtcaccatatcagtagacacgtccaagaaccagttctccctgaagctgagctctgtgaccgctgcggacacggccgtgtattactgtgcgagattgactacggtgacttccccgcgggcctcgacctttgactactggggccagggaaccctggtcaccgtctcctcag

SEQ ID NO: 9732 - DNA, 367 bp, Homo sapiens
caggtgcagctgcaggagtcgggcccaggactggtgaagccttcggagaccctgtccctcacctgcactgtctctggtggctccatcagtagttactactggagctggatccggcagcccccagggaagggactggagtggattgggtatatctattacagtgggagcaccaactacaacccctccctcaagagtcgagtcaccatatcagtagacacgtccaagaaccagttctccctgaagctgagctctgtgaccgctgcggacacggccgtgtattactgtgcgagagtctatgtaggatactatgatagtagtggttattttgactactggggccagggaaccctggtcaccgtctcctcag

SEQ ID NO: 9733 - DNA, 367 bp, Homo sapiens
caaatgcagctggtgcagtctgggcctgaggtgaagaagcctgggacctcagtgaaggtctcctgcaaggcttctggattcacctttattagctctgctgtgcagtgggtgcgacaggctcgtggacaacgccttgagtggataggatggatcgtcgttggcagtggtgacacaaactacacacagaacttccaggaaagagtcaccattaccagggacatgtccacaagcacggcctacatggagctgagcagcctgagatccgaggacacggccgtgtattactgtgcggcaggggttatcaaatgggctacggtgactccctttgggtactggggccagggaaccctggtcaccgtctcctcag

SEQ ID NO: 9734 - DNA, 370 bp, Homo sapiens
gaagagcagctggtgcagtccggagcagaggtgaaaaagcccggggagtctctgaggatctcctgtcagggttctggatacagcttttccagcttctggatcacctgggtgcgccagatgcccgggaaaggcctggagtggatggggaggattgatcctagtgactcttataccaactacagcccgtccttccaaggccacgtcaccatctcagctgacaagtccatcagcactgcctacctgcagtggagcagcctgaaggcctcggacaccgccatgtattactgtgcgagacttgagtacgatagcagtgcttaccccaactggttcgacccctggggccagggaaccctggtcaccgtctcctcag

SEQ ID NO: 9735 - DNA, 370 bp, Homo sapiens
caggtgcagctggtgcagtctggggctgaggtgaagaagcctggggcctcagtgaaggtttcctgcaaggcgtctgcaaacaccttcaccaactactatatgcactgggtgcgacaggcccctggacaagggcttgagtggatgggaataatcaaccctagtggtgatagcacaagctacgcacagaagttccagggcagagtcaccatgaccagggacacgtccacgagcacagtctacatggagctgcgcagcctgagatctgaggacacggccgtgtattactgtgcgaggggatccttacatagcagcagctggacggggtactttgactcgtggggccagggaaccctggtcaccgtctcctcag

SEQ ID NO: 9736 - DNA, 370 bp, Homo sapiens
caggtgcagctggtgcagtctggggctgaggtgaagaagcctggggcctcagtgaaggtttcctgcaaggcatctggatacaccttcaccaggtactatatgcactgggtgcgacaggcccctggacaagggcttgagtggatgggaataatcaaccctagtggtggcagtacaagctacgcacggaggttccagggcagagtcaccatgaccagcgacacgtccgcgagcatagtctacatggagctgagcagcctgagatctgaggacacggccgtgtattactgtgcgagagatttcgggctgatcccgcagcagctcgttctgtttgaatactggggccagggaaccctggtcaccgtctcctcag

SEQ ID NO: 9737 - DNA, 373 bp, Homo sapiens
caggtgcagctgcaggagtcgggcccaggactggtgaagccttcacagaccctgtccctcacctgcgctgtctctggtggctccatcagcagtggtggttactcctggagctggatccggcagccaccagggaagggactggagtggattgggtatatctattacagtgggagcacctactacaacccgtccctcaagagtcgagttaccatatcagtagacacgtccaagaaccagttctccctgaagctgagctctgtgaccgccgcggacacggccgtgtattactgtgccagagagccgcggggggaatatgatagtagtggttattaccagaactggggccagggaaccctggtcaccgtctcctcag

SEQ ID NO: 9738 - DNA, 370 bp, Homo sapiens
gaggtgcagctggtggagtctgggggaggcttggtccagcctggggggtccctgagactctcctgttcagcctctggattcaccttcagtagctatgctatgcactgggtccgccaggctccagggaagggactggaatatgtttcagctattagtagtaatgggggtagcacatactacgcagactcagtgaagggcagattcaccatctccagagacaattccaagaacacgctgtatcttcaaatgagcagtctgagagctgaggacacggctgtgtattactgtgtgaaagatcgcacggttggtagcagcagctggtgctactttgactactggggccagggaaccctggtcaccgtctcctcag

SEQ ID NO: 9739 - DNA, 352 bp, Homo sapiens
gaggtgcagctggtagagtctggaggaggcttgatccagccgggggggtccctgagactctcctgtgcagcctctgagatcatcgtcagtagcaactacatgaactgggtccgccaggctccagggaaggggctggagtgggtctcaattatttatagcggtggtagcacattctacgcagactccgtgaagggccgattcaccatctccagagacaattccaagaacacgctgtatcttcaaatgaacagcctgagagtcgaggacacggccgtgtattactgtgcgagatcctacggtgatctttacttagactactggggccagggaaccctggtcaccgtctcctcag

SEQ ID NO: 9740 - DNA, 352 bp, Homo sapiens
gaggtgcaactggtggagtctggaggaggcttgatccagcctggggggtccctgagactctcctgtgcagcctctgggttcatcgtcagtcacaactacatgagctgggtccgccaggctccagggaaggggctggagtgggtctccgttatttatagcggtggtagcacattctacgcagactccgtgaagggccgattcaccatctccagagacaattccaagaacacgctgtatcttcaaatgaacagcctgagagccgaggacacggccgtgtattactgtgcgagagactacggtggtaatcgttttgactactggggccagggaaccctggtcaccgtctcctcag

SEQ ID NO: 9741 - DNA, 352 bp, Homo sapiens
gaggtgcagctggtggagtctggaggaggcttgatccagcctggggggtccctgagactctcctgtgcagcctctgggttcaccgtcagtagcaactacatgagctgggtccgccaggctccagggaaggggctggagtgggtctcagttatttatagcggtggtagcacatactacgcagactccgtgaagggccgattcaccatctccagagacaattccaagaacacgctgtatcttcaaatgaacagcctgagagccgaggacacggccgtgtattactgtgcgagagaagtctggtcacgggccggggcgcgctggggccagggaaccctggtcaccgtctcctcag

SEQ ID NO: 9742 - DNA, 350 bp, Homo sapiens
gaggtgcagctggtggagtctggaggaggcttgatccagcctggggggtccctgagactctcctgtgcagcctctgaattcatcgtcagtagaaactacatgagttgggtccgccaggctccagggatggggctggagtgggtctcagttatttatagcggtggtagcacatactacgcagattccgtgaagggccgattcaccatctccagagacgattccaagaacacgctgtatcttcaaatgaacagcctgagagtcgaggacacggccgtgtattactgtgcgagagactacggtgacttctacttcgactactggggccagggaaccctggtcaccgtctcctc

SEQ ID NO: 9743 - DNA, 373 bp, Homo sapiens
cagatcaccttgaaggagtctggtcctacgctggtgaaacccacacagaccctcacgctgacctgcaccttctctgggttctcactcagcactagtggagtgggtgtgggctggatccgtcagcccccaggaaaggccctggagtggcttgcactcatttattgggatgatgataagcgctacagcccatctctgaagagcaggctcaccatcaccaaggacacctccaaaaatcaggtggtccttacaatgaccaacatggaccctgtggacacagccacatattactgtgcacagactacgtggggatacagtggctacgcccaatactttgactactggggccagggaaccctggtcaccgtctcctcag

SEQ ID NO: 9744 - DNA, 367 bp, Homo sapiens
caggtgcagctggtggagtctgggggaggcgtggtccaggctgggaggtccctgagactcgcctgtacagcgtctggattcaccttcagtagctatggcatgcactgggtccgccaggctccaggcaaggggctggagtggatgggagttatatggtatgatggaagtaataaatattatgcagattccgtgaagggccgattcaccatctccagagacaattccaagaatacgctgtatttgcaaatgaacagcctgagagccgaggacacggctgtgtattactgtgcgagagatcataggtttggggaggtatctgacaactttaatatctggggccaagggacaatggtcaccgtctctccag

SEQ ID NO: 9745 - DNA, 373 bp, Homo sapiens
caggtgcagctgcaggagtcgggcccaggactggtgaagccttcacagaccctgtccctcacctgcactgtctctggtggctccatcagcagtggtgattactactggagctggatccgccagcacccagggaagggcctggagtggattgggtacatcttttacagtgggagcacctactacaacccgtccctcaggagtcgacttaccatatcagtggacacggctaagaaccagttctccctgaagctgagctctgtgactgccgcggacacggccgtgtatttctgtacgagagatggtggtggaacgacgtggggcccgaactactttgactactggggccagggaaccctggtcaccgtctcctcag

SEQ ID NO: 9746 - DNA, 373 bp, Homo sapiens
caggtgcagctgcacgagtcgggcccaggactggtgaagccttcacagaccctgtccctcacctgcactgtctctggtggctccatcagcagtggtggttactactggagctggatccgccagcacccagggaagggcctggagtggattgggtacatctattacagtgggagcacctactacaacccgtccctcaagggtcgagttaccatctcagtagacacgtctaacaaccagttctccctgaagctgagctctgtgactgccgcggacacggccgtgtattactgtgcgaggatgccccgcacgatttttggagtggttactcaaattgactactggggccagggaaccctggtcaccgtctcctcag

SEQ ID NO: 9747 - DNA, 370 bp, Homo sapiens
gaggtgcagctgttggagtctgggggaggcttgctacagcctggggggtccctgagactctcctgtgcagtctctggattcacctttagcagctatgccatgagttgggtccgccaggctccagggaaggggctggagtgggtcgcagctattagtaatagtggtggtaacatatactacgcagactccgtgaagggccggttcaccatctccagagacaattctaagaacacgctgtatctgcaaatgaacagcctgagagccgaggactcggccacatattactgtgcgaatggtatagcagtggctggccgttcatcgtactactttcactcctggggccagggaaccctggtcaccgtctcctcag

SEQ ID NO: 9748 - DNA, 370 bp, Homo sapiens
gaggtgcagctgttggagtctgggggaggcttggtacagcctggggggtccctgagactctcctgtgcagcctctggattcacctttagcagctatgccatgagctgggtccgccaggctccagggaaggggctggagtgggtctcagctattagtggtagtggtggtagcacatactacgcagactccgtgaagggccggttcaccatctccagagacaattccaagaacacgctgtatctgcaaatgaacagcctgagagccgaggacacggccgtatattactgtgcaaccgttaaggcgtattactatggtttggggagttgttttgactactggggccagggaaccctggtcaccgtctcctcag

SEQ ID NO: 9749 - DNA, 370 bp, Homo sapiens
gaggtgcagctgttggagtctgggggaggcttggtacagcctggggggtccctgagactctcctgtgcagcctctggattcacctttagtagctatgccatgagctgggtccgccaggctccagggaagggactggagtgggtctcaactattattaatagtggcggtagcacatactacgcagactccgtgaagggccggttcaccatctccagagacaattccaagaacacgctgtatatgcaaatgaacagcctgagagccgacgacacgggcgtatattactgtgcgaacggcatagcaatggctggccgttcatcgtacttcttttactactggggccagggaaccctggtcaccgtctcctcag

SEQ ID NO: 9750 - DNA, 370 bp, Homo sapiens
gaggtgcagctgttggagtctgggggaggcttggtacagcccggggggtccctgagactctcctgtgcagcctctggattcacctttagcaactatggcgtgaactgggtccgccaggctccagggaaggggctggagtgggtctcatctattagtggtaatggtattagcacatactacgcagactccgtgaagggccggttcaccatctccagagacaattccaagaacacgctgaatctgcaaatgagcagcctgagagccgaagacacggccgtatattactgtgcgaaaaatcttgaaatgggtgtaataggaactggttactttgacaactggggccagggaaccctggtcaccgtctcctcag

SEQ ID NO: 9751 - DNA, 366 bp, Homo sapiens
caggtgcagctgcaggagtcgggcccaggactggtgaagccttcggagaccctgtccctcacctgcactgtctctggtggctccatcagtagttactactggagctggatccggcagcccgccgggaagggactggagtggattgggcgtatctataccagtgggagcaccaactacaacccctccctcaagagtcgagtcaccatgtcagtagacacgtccaagaaccagttctccctgaagctgagctctgtgaccgccgcggacacggccgtgtattactgtgcgagagattggagctatggtccttactactactacggtatggacgtctggggccaagggaccacggtcaccgtctcctca

SEQ ID NO: 9752 - DNA, 369 bp, Homo sapiens
gaggtgcagctggtggagtctgggggaggcttggtgcagcctggggggtccctgagactctcctgtgcagcctctggattcaccttcagtaattataacatgaactgggtccgccaggctccagggaaggggctggagtgggtttcatacattagtagtagtagtgctaccatatactacgcagactctgtgaagggccggttcaccatctccagagacaatgccaagaattcagtgtatctgcaaatgaacagcctgagagacgaggacacggctgtgtattactgtgcgagagaggtaggagctctaggctactactactacggtatggacgtctggggccaagggaccacggtcaccgtctcctca

SEQ ID NO: 9753 - DNA, 369 bp, Homo sapiens
caggtgcagctggtgcagtctggggctgaggtgaagaagcctggggcctcagtgaaggtttcctgcaaggcatctggacacaccttcaccagtcaatatatacactgggtgcgacaggcccctggacaagggcttgagtggatgggaataatcaaccctagtgctggtagcacaagctacgcacagaagttccagggcagagttaccatgaccagggacacgtccacgagcacagtctacatggagctgagcagcctgagatctgaggacacggccgtgtattactgtgcgagagacctcacgttcattccctcagcctattacggtatggacgtctggggccaagggaccacggtcaccgtctcctca

SEQ ID NO: 9754 - DNA, 366 bp, Homo sapiens
gaggtgcagctgatggagtctgggggaggcttggtacagcctggcaggtccctgagactctcctgtgcagcctctggattcacctttgatgatttcgccatgcactgggtccggcaagctccagggaagggcctggagtgggtctcaggcattagttgggatagtggtagcataggctatgcggactctgtgaagggccgattcaccatctccagagacaacgccaagaactccctgtatctgcacatgaaaagtctgagacctgaggacacggccttgtattactgtgtgaaagacctcctaggtggttactactactacactatgcacgtctggggccaagggaccacggtcaccgtctcctca

SEQ ID NO: 9755 - DNA, 373 bp, Homo sapiens
caggtgcagctgcaggagtcgggcccaggactggtgaagccttcacagaccctgtccctcacctgcactgtctctggtggctccatcagcagtggtggttactactggagctggatccgccagcacccagggaagggcctggagtggattgggtacatctattacagtgggagcacctactacaacccgtccctcaagagtcgagttaccatatcagtagacacgtctaagaaccagttctccctgaagctgagctctgtgactgccgcggacacggccgtgtattactgtgcgagcgggggggacttgggagctcctacgtatgatgcttttgatatctggggccaagggacaatggtcaccgtctcttcag

SEQ ID NO: 9756 - DNA, 370 bp, Homo sapiens
caggttcagctggtgcagtctggagctgaggtgaagaagcctggggcctcagtgaaggtctcctgcaaggcttctggttacacctttaccaattacggtatcacctgggtgcgacaggcccctggacaagggcttgagtggatgggatggatcagcccttacaatggagacacaaactatgcacagatgctccagggcagagtcaccatgaccgcagacacatccacgagcacagcccacatggagctgaggagcctgagaactgacgacacggccgtgtattattgtgcgagagtagcggccgcgtacagctggaacgacgcctctcctggctactggggccagggaaccctggtcaccgtctcctcag

SEQ ID NO: 9757 - DNA, 370 bp, Homo sapiens
gaggtgcagctggtggagtctgggggaggcttggtccagcctggggggtccctgagactctcctgtgcagcctctggattcacctttagtagctattggatgacctgggtccgccaggctccagggaaggggctggagtgggtggccaacatagagcaagatggaagtgagaaaaactatgtggactctgtgaagggccgattcaccatctccagagacaacgccaagaactcagtgtatctgcaaatgaacagcctgagagccgaggacacggctgtgtattactgtgcgagagatggccagggctccggggtgggaactactgactttgactactggggccagggaaccctggtcaccgtctcctcag

SEQ ID NO: 9758 - DNA, 369 bp, Homo sapiens
caggtgcagctggtgcagtctggggctgaggtgaagaagcctgggtcctcggtgaaggtctcctgcaaggcttctggaggcaccctcagcaactatgttatcacctgggtgcgacaggcccctggacaagggcttgagtggatgggagggatcaacgctttctttggtacaacaaactacgcacagaagttccagggcagactcaccattaccgcggacgaatccacgaacacagcctacatggagttgagcagcctgagatctgaggacacggccgtgtattactgtgcgagaggcccctacggtgacaacgttctcgaccacggaatggacgtctggggccaagggaccacggtcaccgtctcctca

SEQ ID NO: 9759 - DNA, 369 bp, Homo sapiens
caggtgcagttggtgcagtctggggctgaggtgaagaagcctgggtcctcggtgaaggtctcctgcaaggcttctggagggaccttcagcagcgatgttatcagctgggtgcgacaggcccctggacaagggcttgagtggatgggagggatcacccctatctttgatacaccaaactacgcacagaagtttcagggcagagtcacgattaccgcggacgaatccacgagcacagcctacatggagctgagcagcctgagatctgaggacacggccgtgtattactgtgcgagtgccgcaacctggaacgactactactacaacggtatggacgtctggggccaagggaccacggtcaccgtctcctca

SEQ ID NO: 9760 - DNA, 369 bp, Homo sapiens
caggtgcagctggtgcagtctggggctgaggtgaagaagcctgggtcctcggtgaaggtctcctgcaaggcttctggagacaccttcagcagctattctatcaactgggtgcgacaggcccctggacaagggcttgagtggatgggagggatcatccctgtctttggtacagcaaactacgcacagaagttccagggcagagtcacaattaccgcggacgaatccacgaatacagcctacatggagctgagcagcctgagatctgaggacacggccgtatattactgtgcgagaacgttagagtattacgatattttgactggttattataccctctggggccaagggaccacggtcaccgtctcctca

SEQ ID NO: 9761 - DNA, 375 bp, Homo sapiens
gaggtgcagctggtggagtctgggggaggcttggtaaagcctggggggtcccttagactctcctgtgcagcctctggattcactttcagtaacgcctggatgagctgggtccgccaggctccagggaaggggctggagtgggttggccgtattaaaagcaaaactgatggtgggacaacagactacgctgcacccgtgaaaggcagattcaccatctcaagagatgattcaaaaaacacgctgtatctgcaaatgaacagcctgaaaaccgaggacacagccgtgtattactgtaccacagatcaggaccgatattttgactggttaccccgtatggacgtctggggccaagggaccacggtcaccgtctcctca

SEQ ID NO: 9762 - DNA, 367 bp, Homo sapiens
caggtgccgctacagcagtggggcgcaggactgttgaagccttcggagaccctgtccctcacctgcgctgtctctggtgggtccctcagtggttactactggagctggatccgccagcccccagggaaggggctggagtggattggggaaatcattcatagtggaggcaccaactacaacccgtccctcaagagtcgagtcaccatatcagtagacacgtccaagaaccagttctccctgaagctgacctctgtgaccgccgcggacacggctgtttattactgtgcgagaggacggggcttactctggttcggggagtcagggattgactactggggccagggaaccctggtcaccgtctcctcag

SEQ ID NO: 9763 - DNA, 370 bp, Homo sapiens
caggtgcagttggtggagtctgggggaggcgtggtccagcctgggaggtccctgagactctcctgtgcagcgtctggattcaccttcagtagctttggcgttcactgggtccgccaggctccaggcaagggactggagtgggtggcagttatatggtatgatggaagtaataaagattatgcagactccgtgaagggccgattcaccatctccagagacaattccaagaatacgctgtatctgcaaatgaacagcctgagagccgaggacacggctgtctattactgtgcgagagaactactcgtggaaacatctatggcccgggtccttgatatctggggccaagggacaatggtcaccgtctcttcag

SEQ ID NO: 9764 - DNA, 370 bp, Homo sapiens
caggtgcagctggtggagtctgggggaggagtggtccagcctgggaggtccctgagactctcctgtgcagcctctggattcaccttcagtagctatgctatgcactgggtccgccaggctccaggcaaggggctggagtgggtggcagttatatcatatgatggaaggcataaatactacgcagactccgtgaagggccgattcaccatctccagagacaattccaagaacacgctgtatgtgcaaatgaacagcctgagaactgaggacacggctgtgtattcctgtgcgagtgccccgggactattgggaaccgacattgatgcttttgatgtctggggccaagggacaatggtcaccgtctcttcag

SEQ ID NO: 9765 - DNA, 366 bp, Homo sapiens
gaagtgcagctggtggagtctgggggaggcttggtacagcctggcaggtccctgagactctcctgtgcagcctctggattcacttttgatgattatgtcatgcactgggtccggcaagctccagggaagggcctggagtgggtctcaggtattaattggaatagtgggagcatgggctatgcggactctgtgaagggccgattcaccatctccagagacaacgccaagaactccctgtatctgcaaatgaacagtctgagagctgaggacacggccttgtattactgtgcaaaagataaagggtggggtcctggttactactctatggacgtctggggccaagggaccacggtcaccgtctcctca

SEQ ID NO: 9766 - DNA, 370 bp, Homo sapiens
gaggtgcagctggtggagtctgggggaggcctggtcaagcctggggggtccctgagactctcctgtgcagcctctggattcaccttcagtagctatagcatgaactgggtccgccaggctccagggaaggggctggagtgggtctcatccattagtagtagtagtagttacatatactacgcagactcagtgaagggccgattcaccatctccagagacaacgccaagaactcactgtatctgcaaatgaacagcctgagagccgaggacacggctgtgtattactgtgcgagagatcatttcggacggcagctgggcctctggtacttcgatctctggggccgtggcaccctggtcactgtctcctcag

SEQ ID NO: 9767 - DNA, 370 bp, Homo sapiens
gaggtgcagctgttggagtctgggggaggcttggtacagcctggggggtccctgagactctcctgtgcagcctctggattcacctttagcagctatgccatgagctgggtccgccaggctccagggaaggggctggagtgggtctcagctattagtggtagtggtggtagcacatactacacagactccgtgaggggccggttcaccatctccagagacaattccaagaacacgctgtatctgcaaatgaacagcctgagagccgacgacacggccgtatattattgtgcgaaagacattgactggtcgctcatacaagctgaatacttccaacactggggccagggcaccctggtcaccgtctcctcag

SEQ ID NO: 9768 - DNA, 384 bp, Homo sapiens
caggtgcagctgcaggagtcgggcccaggactggtgaagccttcggagaccctgtccctcacctgcactgtctctggtggctccgtcagcagtggtagttactactggagctggatccggcagcccccagggaagggactggagtggattgggtatatctattacagtgggagcaccaactacaacccctccctcaagagtcgagtcaccatattagtagacacgtccaagaaccagttctccctgaagctgagctctgtgaccgctgcggacacggccgtctattactgtgcgagagagagcattggagtagtaccagctgctcgaccccactactacggtatggacgtctggggccaagggaccacggtcaccgtctcctca

SEQ ID NO: 9769 - DNA, 370 bp, Homo sapiens
caggtgcagctggtgcagtctggggctgaggtgaagaagcctggggcctcagtgaaggtttcctgcaaggcatctggatacaccttcaccagctactatatgcactgggtgcgacaggcccctggacaagggcttgagtggatgggaaaaatcaaccctagtggtggcagcgcaagtaacgcacagaagttccagggcagagtcaccatgaccagggacacgtccacgagcacagtctacatggagctgagcagcctgagatctgaagacacggccgtgtattactgtgcgagaggtggggcggtggtaaatccggcgtactggtacttcgatatctggggccgtggcaccctggtcactgtctcctcag

SEQ ID NO: 9770 - DNA, 381 bp, Homo sapiens
caggtgcagctggtgcagtctggggctgaggtgaagaagcctggggcctcagtgaaggtctcctgcaaggcttctggatacaccttcaccggctactatatgcactgggtgcgacaggcccctggacaagggcttgagtggatgggatggatcaaccctaacagtggtggcacaaactatgcacagaagtttcagggcagggtcaccatgaccagggacacgtccatcagcacagcctacatggagctgagcaggctgagatctgacgacacggccgtgtattactgtgcgaggagtgtccgtggatatagtggctacgattactactactactacggtatggacgtctggggccaagggaccacggtcaccgtctcctca

SEQ ID NO: 9771 - DNA, 369 bp, Homo sapiens
caggtgcagctggtgcagtctggggctgaggtgaagaagcctggggcctcagtgaaggtctcctgcaaggcttctggatacaccttcaccggcttctatatacactgggtgcgacaggcccctggacaagggcttgagtgcatgggatggatcaaccctaacagtggtaacacaaactatgcacagaagtttcagggcagggtcaccttgaccagggacacgtccatcagcacagcctacatggagctgagcaggctgagatctgacgacacggccgtatattactgtgcgagacgacttcgaggcagcagttgggggcactacggtatggacgtctggggccaagggaccacggtcaccgtctcctca

SEQ ID NO: 9772 - DNA, 370 bp, Homo sapiens
caggtgcagctggtgcagtctggggctgaggtgaagaagcctggggcctcagtgaaggtctcctgcaaggcttctggatacaccttcaccggctactatatgcactgggtgcgacaggcccctggacaagggcttgagtggatgggacggatcaaccctaacagtggtggcacaaactatgcacagaagtttcagggcagggtcaccatgaccagggacacgtccatcagcacagcctacatggagctgagcaggctgagatctgacgacacggtcgtgtattactgtgctgcaagtatttgtagtagtaccagctgctacgatgcttttgatatctggggccaagggacaatggtcaccgtctcttcag

SEQ ID NO: 9773 - DNA, 387 bp, Homo sapiens
gaggtgcagctggtggagtctgggggaggcttggtaaagccagggcggtccctgagactctcctgtacagcttctggattcacctttggtgattatgctatgagttggttccgccaggctccagggaaggggctggagtgggtaggtttcattagaaccaaagtttatggtgagacaacacaatacgccgcgtctgtgaaaggcagattcaccatctcaagagatgattccaaaagcatcgcctatctgcaaatgaacagcctgaaaaccgaggacacagccgtgtattactgtactagagtttttccggagtggagtggttattattcacactactactacggtatggacgtctggggccaagggaccacggtcaccgtctcctca

SEQ ID NO: 9774 - DNA, 373 bp, Homo sapiens
cagctgcagctgcaggagtcgggcccaggactggtgaagccttcggagaccctgtccctcacctgcactgtctctggtggctccatcagcagtagtagttactactggggctggatccgccagcccccagggaaggggctggagtggattgggagtatctattatagtgggagcacctactacaacccgtccctcaagagtcgagtcaccatatccgtagacacgtccaagaaccagttctccctgaagctgagctctgtgaccgccgcagacacggctgtgtattactgtgcgagaccactgacggggtattactatggttcggggagttatggccactggggccagggaaccctggtcaccgtctcctcag

SEQ ID NO: 9775 - DNA, 367 bp, Homo sapiens
gaagtgcagctggtggagtctgggggaggcttggtacagcctggcaggtccctgagactctcctgtgcagcctctggattcacctttgatgattatgccatgcactgggtccggcaagctccagggaagggcctggaatgggtctcaggtattagttggaatagtggtaccataggctatgcggactctgcgaagggccgattcaccatctccagagacaacgccaagaactccctgtatctgcaaatgaacagtctgagaactgaggacacggccttgtattactgtgcaaaagatcccgcgctgagaggtgacagctatggtttccattactggggccagggaaccctggtcaccgtctcctcag

SEQ ID NO: 9776 - DNA, 378 bp, Homo sapiens
gaagtgcagctggtggagtctgggggagtcgtggtacagcctggggggtccctgagactctcctgtgcagcctctggattcacctttgatgattatgccatgcactgggtccgtcaagctccggggaagggtctggagtgggtctctcttattagttgggatggtggtagaacctactatgcagactctgtgaagggtcgattcaccatctccagagacaacagcaaaaactccctgtatctgcaaatgaacagtctgagagctgaggacaccgccttgtattattgtgcaaaagatacatgggggccacacagctatggttactactactactacggtatggacgtcaggggccaagggaccacggtcaccgtctcc

SEQ ID NO: 9777 - DNA, 381 bp, Homo sapiens
gaggtgcagctggtggagtctgggggaggcctggtcaagcctggggggtccctgagactctcctgtgctgcctctggattcaccttcagtagctataccatgaactgggtccgccaggctccagggaaggggctggagtgggtctcatctattagtagtagtagtagttacatatactacgcagactcagtgaagggccgattcaccatgtccagagacaacgccaagaactcactgtatctgcaaatgaacagcctgagagccgaggacacggctgtgtattactgtgcgagagaggtgcgtggatatactggtcccgccggcgggctgtactacggtatggacgtctggggccaagggaccacggtcaccgtctcctca

SEQ ID NO: 9778 - DNA, 381 bp, Homo sapiens
gaggtgcagctggtggagtctgggggaggcctggtcaagcctggggggtccctgagactctcctgtgcagcctctggattcaccttcagtagctatagcatgaactgggtccgccaggctccagggaaggggctggagtgggtctcatccattagtagtagtagtagttacatatactacgcagactcagtgaagggccgattcaccatctccagagacaacgccaagaactcactgtatctgcaaatgaacagcctgagagccgaggacacggctgtgtattactgtgcgagagaggtggggtattacgatattttgactggttcctactactacggtatggacgtctggggccaagggaccacggtcaccgtctcctca

SEQ ID NO: 9779 - DNA, 381 bp, Homo sapiens
caggtgcagctggtgcagtctggggctgaggtgaagaagcctgggtcctcggtgaaggtctcctgcaaggcttcaggaggcaccttcagcagctatgctatcagctgggtgcgacaggcccctggacaagggcttgagtggatgggagggatcatccctatctttggtgcagaaaattacgcacagaagttccagggcagagtcacgattaccgcggacgaatccacgagcacagcctacatggagctgagcagcctgagatctgaggacacggccgtgtattactgtgcgagagatcaagacattcagttggggccttccccctggggctactacggtttggacgtctggggccaagggaccacggtcaccgtctcctca

SEQ ID NO: 9780 - DNA, 381 bp, Homo sapiens
caggtgcagctggtggagtctgggggaggcgtggtccagcctgggaggtccctgagactctcctgtgcagcctctggattcaccttcagtagctatgctatgcactgggtccgccaggctccaggcaaggggctggagtgggtggcagttatatcatatgatggaagtaataaatactacgcagactccgtgaagggccgattcaccatctccagagacaattccaagaacacgctgtatctgcaaatgaacagcctgagagctgaggacacggctgtgtattactgtgcgagaggatattgtagtggtggtagctgcatatactactactactacggtatggacgtctggggccaagggaccacggtcaccgtctcctca

SEQ ID NO: 9781 - DNA, 384 bp, Homo sapiens
cagctgcagctgcaggagtcgggcccaggactggtgaagccttcggagaccctgtccctcacctgcactgtctctggtggctccatcagcagtagtagttactactggggctggatccgccagcccccagggaaggggctggagtggattgggagtatctattatagtgggagcacctactacaacccgtccctcaagagtcgagtcaccatatccgtagacacgtccaagaaccagttctccctgaagctgagctctgtgaccgccgcagacacggctgtgtattactgtgcgagactagcttccgattacgatattttgactggttattatacctacggtatggacgtctggggccaagggaccacggtcaccgtctcctca

SEQ ID NO: 9782 - DNA, 378 bp, Homo sapiens
gaggtgcagctggtggagtctggaggaggcttgatccagcctggggggtccctgagactctcctgtgcagcctctgggttcatcgtcagtaggaattacatgagctgggtccgccaggctccagggaaggggctggagtgggtctcagctgtttatagcggtggtagcacattctacgcagactccgtgaagggccgattcaccatctccagagacaattccaagaacacactgtatctgcaaatgaacagcctgagagctgaggacacggctgtgtattactgtgcgagagattatgtagtggtggtagctgctactcatcactactacaacggtatggacgtctggggccaagggaccacggtcaccgtctcctca

SEQ ID NO: 9783 - DNA, 382 bp, Homo sapiens
gaagtgcagctggtggagtctgggggaggcttggtacagcctggcaggtccctgagactctcctgtgcagcctctggattcaccttcgatgagtatgccatgcactgggtccggcaagctccagggaagggcctggagtgggtctcaggtagtagttggaatagtggtatcataggctacgcggactctgtgaagggccgattcaccatctccagagacaacgccaagaacgccctgtatctgcaaatgaacagtctgagagttgaggacacggccttgtattactgtgcaaaagatacgggggggagatacagctatggttccgggaggtcgggaggatatgactactggggccagggaaccctggtcaccgtctcctcag

SEQ ID NO: 9784 - DNA, 396 bp, Homo sapiens
gaggtgcagctgttggagtctgggggaggcttggtacagcctggggggtccctgagactctcctgtgcagtctctggattcacctttagcagatatgccatgagctgggtccgccaggctccagggaaggggctggagtgggtctcaggtattagtggtagtggtggtggcacatacggtggtaccacatactacgcagactccgtgaagggccggttcaccatctccagagacaattccaagaacacgttgtatctgcaaatgaccagtctgagagccgaggacacggccatatattactgtgcgaaagatcccggcctcagatatagtggttacgatttctactactatggtatggacgtctggggccaagggaccacggtcaccgtctcctca

SEQ ID NO: 9785 - DNA, 367 bp, Homo sapiens
gaagtgcagctggtggagtctgggggaggcttggtacagcctggcaggtctctgagactctcctgtgcagcctctggattcacctttgatgattatgccatgcactgggtccggcaagttccagggaagggcctggagtgggtctcaggtattagttggaatagtggtaccataggctatgcggactctgtgaagggccgatttaccatctccagagacaacgccaagaattccctgtatctgcaaatgaacagtctgagaactgaggacacggccttgtactactgtgcaaaagaccacactacggtgacttccacgccgtggttcgacccctggggccagggaaccctggtcaccgtctcctcag

SEQ ID NO: 9786 - DNA, 381 bp, Homo sapiens
caggtccagctggtacagtctggggctgaggtgaagaagcctggggcctcagtgaaggtctcctgcaaggtttccggatacaccctcactgaattctccatgcactgggtgcgacaggctcctggaaaagggcttgagtggatgggcagttttgatcctgaagatggtgaaacaatctacgcacagaagttccagggcagagtcaccatgaccgaggacacatctacacacacagcctacatggagctgagtagcctgagatctgaggacacggccgtgtattactgtgcaaccctcagtgtagtagcagccgctattgggaattactactactacggtatggacgtctggggccaagggaccacggtcaccgtctcctca

SEQ ID NO: 9787 - DNA, 385 bp, Homo sapiens
cagatcaccttgaaggagtctggtcctacgctggtgaaacccacacagaccctcacgctgacctgcagcttctctgggttctcactcagcactggtggagtgggtgtgggctggatccgtcagcccccaggaaaggccctggagtgacttacactcatttattggaatgatgataagcgctacagcccatctctgaagagcaggctcaccatcaccaaggacacctccaaaaaccaggtggtccttacaatgaccaacatggaccctgtggacacagccacctattactctgcacacagtgatgggtggtagacgtagagatggctacaattacgtcggttctttgactactggggccagggcaccctggtcaccgtctcctcag

SEQ ID NO: 9788 - DNA, 385 bp, Homo sapiens
cagatcaccttgaaggagtctggtcctacgctggtgaaacccacacagaccctcacgctgacctgcaccttctctgggttctcactcagcactagtggagtgggtgtgggctggatccgtcagcccccaggaaaggccctggagtggcttgcactcatttattggaatgatgataagcgctacagcccatctctgaagagcaggctcaccatcaccaaggacacctccaaaaaccaggtggtccttacaatgaccaacatggaccctgtggacacagccacgtattactgtgcacggacacgtatagcagcagctggtattcttggcggaaagatatactactttgactactggggccagggaaccctggtcaccgtctcctcag

SEQ ID NO: 9789 - DNA, 370 bp, Homo sapiens
caaatgcagctggtgcagtctgggcctgaggtgaagaagcctgggacctcagtgaaggtctcctgtaaggcttctggattcacctttagtagttctgctgtgcagtgggtgcgacaggctcgtggacaacgccttgagtggataggatggatcgtcgttggcagtggtaacgcaaactacgcaccgcagttccaggatagagtcaccattaccagggacatgtccacaagcacagcctacatggagctgagcagcctgagatccgaggacacggccgtgtattactgtgcggcccccaattgtagtagaaccagctgcgccgatggttttgatatctggggccaagggacaacggtcaccgtctcttcag

SEQ ID NO: 9790 - DNA, 368 bp, Homo sapiens
caaatgcagctggtgcagtctgggcctgaggtgaagaagcctgggacctcagtgaaggtctcctgcaaggcttccggattcacctttagtagctctgctgtgcagtgggtgcgacaggctcgtggacaacgccttgagtggataggatggatcgtcgttggcagtggtaacacaaactacgcacagaagttccaggagagagtcaccattaccagggacatgtccacaagcacagcctacatggagctgagcagcctgagatccgaggacacggccgtgtattactgtgcggctccctcttgtagtggtggtagctgctttgatggttttgatatctggggccaagggacattggtcaccgtctcttc

SEQ ID NO: 9791 - DNA, 382 bp, Homo sapiens
caggttcagctggtgcagtctggagctgaggtgaagaagcctggggcctcagtgaaggtctcctgcaaggcttctggttacacctttaccagctacggtatcagctgggtgcgacaggcccctggacaagggcttgagtggatgggatggatcagcgcttacaatggtaacacaaactatgcacagaagctccagggcagagtcaccatgaccacagacacatccacgagcacagcctacatggagctgaggagcctgagatctgacgacacggccgtgtattactgtgcgagagcgtattacgatttttggagtggttatggcccgggattgtactactttgactactggggccagggaaccctggtcaccgtctcctcag

SEQ ID NO: 9792 - DNA, 382 bp, Homo sapiens
caggttcagctggtgcagtctggagctgaggtgaagaagcctggggcctcagtgaaggtctcctgcaaggcttctggttacacctttaccagctacggtatcagctgggtgcgacaggcccctggacaagggcttgagtggatgggatggatcagcgcttacaatggtaacacaaactatgcacagaagctccagggcagagtcaccatgaccacagacacatccacgagcacagcctacatggagctgaggagcctgagatctgacgacacggccgtgtattactgtgcgagagatcaatccctttatgattacgtttgggggagttatcgttccatctttgactactggggccagggaaccctggtcaccgtctcctcag

SEQ ID NO: 9793 - DNA, 382 bp, Homo sapiens
gaggtgcagctgttggagtctgggggaggcttggtacagcctggggggtccctgagactctcctgtgcagcctctggattcacctttagcagctatgccatgagctgggtccgccaggctccagggaaggggctggagtgggtctcaactcttagtggtagtggtgatagcacatactacgcagactccgtgaagggccgattcaccatctccagagacaattccaagaacactctatatctgcaaatgaacagcctgagagccgaggacacggccgtatattactgtgcgagagacatgaaagattactatgatagtggtgtttattatgcccagcccggtgactactggggccagggaaccctggtcaccgtctcctcag

SEQ ID NO: 9794 - DNA, 382 bp, Homo sapiens
caggtgcaactggtggagtctgggggaggcgtggtccagcctgggaggtccctgagactctcctgtgcagcctctggattcaccttcagtcgctatggcatgcactgggtccgccaggctccaggcaaggggctggagtgggtggcagtaatatcatatgatggaagtaataaataccatgcagactccgtgaagggccgattcaccatctccagagacaattccaagaacacgctgtatctacaaatgaacaccctgagagctgaggacacggctgtctactactgtgcgaaacaaaacgggttatattgtagtgggggaaactgctactccgggtcctttgattactggggccagggaaccctggtcaccgtctcctcag

SEQ ID NO: 9795 - DNA, 382 bp, Homo sapiens
caggtgcagctggtggagtctgggggaggcgtggtccagcctgggaggtccctgagactctcctgtgcagcctctggattcaccttcagtaaatatggcatgcactgggtccgccaggctccgggcaaggggctggagtgggtggcagttatatcatatgatggagataataaatcctatgcagactccgtgaagggccgattcaccatctccagagacaattccaagaacacgctatatctgcaaatgaacagccttagagctgaggacacggctgtctattactgtgcgaaagttgtggggccgtattgcagtggtggtagttgctactcggggggagttgactactggggccagggaacccaggtcaccgtctcctcag

SEQ ID NO: 9796 - DNA, 379 bp, Homo sapiens
caggtgcagctacagcagtggggcgcaggactgttgaagccttcggagaccctgtccctcacctgcgctgtctatggtgggtccttcagtggttactactggagctggatccgccagcccccagggaaggggctggagtggattggggaaatcaatcatagtggaagcaccaactacaacccgtccctcaagagtcgagtcaccatatcagtagacacgtccaagaaccagttctccctgaagctgagctctgtgaccgccgcggacacggctgtgtattactgtgcgcgaggccatattgtactaatggtgtatccatctagggccaggacctactttgactactggggccagggaaccctggtcaccgtctcctcag

SEQ ID NO: 9797 - DNA, 382 bp, Homo sapiens
caggtgcagctggtgcagtctggggctgaggtgaagaagcctggggcctcagtgaaggtctcctgcaaggcttctggatacaccttcaccgactactatatgcactgggtgcgacaggcccctggacaagggcttgagtggatgggatggatcaaccctcagagtggaggcacaaagtatgcacagaagtttcagggcagggtcaccatgaccagggacacggccatcatcacagtgtacatggagctgagcaggctgagatctgacgacacggccgtgtattactgtgcgactgtgtatcttaggggtttggggagttattatcatagcaccgcgccatttgactactggggccagggaaccctggtcaccgtctcctcag

SEQ ID NO: 9798 - DNA, 382 bp, Homo sapiens
gaggtgcagctggtgcagtctggagcagaggtgaaaaagcccggggagtctctgaagatctcctgtaagggttctggatacagctttaccagctactggatcggctgggtgcgccagatgcccgggaaaggcctggagtggatggggatcatctatcctggtgactctgataccagatacagcccgtccttccaaggccaggtcaccatctcagccgacaagtccatcagcaccgcctacctgcagtggagcagcctgaaggcctcggacaccgccatgtattactgtgcgagacggggagggtctgtgttttactatgatagtagtgttaaggagggctttgactactggggccagggaaccctggtcaccgtctcctcag

SEQ ID NO: 9799 - DNA, 382 bp, Homo sapiens
gaggtgcagctggtgcagtctggagcagaggtgaaaaagcccggggaatctctgaagatctcctgtaagggttctggatacagctttaccagctactggatcgcctgggtgcgccagatgcccgggaaaggcctggagtggatggggatcatcattcctggtgactctgataccggatacagcccgtccttccaaggccagttcaccatctcagccgacaagtccatcagcaccgcctacctgcagtggagcagcctgaaggcctcggacaccgccatgtattactgtgcgagacttgtgttttcgggcgatattttgcctggttattatttccctcgacttgactactggggccagggaaccctggtcaccgtctcctcag

SEQ ID NO: 9800 - DNA, 382 bp, Homo sapiens
gaggtgcagctagtgcagtctggagcagaggtgaaaaagcccggggagtctctgaagatctcctgtaagggttctggatacagctttaccagctactggatcggctgggtgcgccagatgcccgggaaaggcctggagtggatggggatcatctatcctggtgactctgataccagatacagcccgtccttccaaggccaggtcaccatctcggccgacaagtccatcagcaccgcctacctgcagtggagcagcctgaaggcctcggacaccgccatgtattactgtgcgagacgtgaacgtttatactatgcttcggggagtgtccggggtgatgcttttgatatctggggccaagggacaatggtcaccgtctcttcag

SEQ ID NO: 9801 - DNA, 385 bp, Homo sapiens
caggtgcagctgcaggagtcgggcccaggactggtgaagccttcggagaccctgtccctcacctgcactgtctctggtggctccgtcagcagtggtagttactactggagctggatccggcagcccccagggaagggactggagtggattgggtatatctattacagtgggagcaccaactacaacccctccctcaagagtcgagtcaccatatcagtagacacgtccaagaaccagttctccctgaagctgagctctgtgaccgctgcggacacggccgtgtattactgtgcgagagtcgatggttcggggagttattatctacgggaggctacccaatactttgactactggggccagggaaccctggtcaccgtctcctcag

SEQ ID NO: 9802 - DNA, 385 bp, Homo sapiens
caggtgcagctgcaggagtcgggcccaggactggtgaagccttcggagaccctgtccctcacctgcactgtctctgctggctccgtcggcagtggtagttactactggagctggatccggcagcccccagggaagggactggagtggattgggtatatctattacactgggagcaccagctacaacccctccctcaagagtcgagtcaccatatcagtagacacgtccaaggaccagttctccctgaaactgagctctgtgaccgctgcggacacggccgtgtattactgtgcgaggtcttactttgatagtagtagttattatcaaaacgtggactactactttgactactggggccagggaaccctggtcaccgtctcctcag

SEQ ID NO: 9803 - DNA, 385 bp, Homo sapiens
cagctgcagctgcaggagtcgggcccaggactggtgaagccttcggagaccctgtccctcacctgcactgtctctggtggctccatcagcagtagtagttactactggggctggatccgccagcccccagggaaggggctggagtggattgggagtatctattatagtgggagcacctactacaacccgtccctcaagagtcgagtcaccatatccgtagacacgtccaagaaccagttctccctgaagctgagctctgtgaccgccgcagacacggctgtgtattactgtgcgagacccctctattactatggttcggggagttattataaaaacgggtattctgactactggggccagggaaccctggtcaccgtctcctcag

SEQ ID NO: 9804 - DNA, 382 bp, Homo sapiens
gaggtgcagctgttggagtctgggggaggcttggtacagcctggggggtccctgagactctcctgtgcagcctctggattcacctttagcagctatgccatgagctgggtccgccaggctccagggaaggggctggagtgggtctcagctattagtggtagtggtggtagcacatactacgcagactccgtgaagggccggttcaccatctccagagacaattccaagaacacgctgtatctgcaaatgaacagcctgagagccgaggacacggccgtatattactgtgcgaaatcgggggggacgtattactatgatagtagtggttatcagcaagcttttgatatctggggccaagggacaatggtcaccgtctcttcag

SEQ ID NO: 9805 - DNA, 382 bp, Homo sapiens
gaagtgcagctggtggagtctgggggaggcttggtacagcctggcaggtccctgagactctcctgtgcagcctctggattcacctttgatgaatatgccatacactgggtccggcaagctccagggaagggcctggagtgggtctcaggtgttagttggaatagtggtatcataggctatgcggactctgtgaagggccgattcaccatctccagagacaacgccaagaactccctgtatctgcaaatgaacagtctgagagctgaggacacggccttgtattactgtgcaaaattgggattacgatcttttgactggtcccccaccgcacgggaagcttttgatatctggggccaagggacagtggtcaccgtctcttcag

SEQ ID NO: 9806 - DNA, 367 bp, Homo sapiens
caggtccagctggtacagtctggggctgaggtgaagaagcctggggcctcagtgaaggtctcctgcaaggtttccggatacaccctcattgaattatccatacactgggtgcgacaggctcctgggaaagggcttgagtggatgggaggttttgatcctgaagatggtgaaacaatctacgcacagaagttccagggcagagtcaccatgaccgaggacacatctacagacacagcctacatggagctgagcagcctgagatctgaggacacggccgtgtattattgtgcaacaggggccagctttggtcctcgaaccaactggttcgacccctggggccagggaaccctggtcaccgtctcctcag

SEQ ID NO: 9807 - DNA, 370 bp, Homo sapiens
caggtgcagctgcaggagtcgggcccaggactggtgaagccttcacagaccctgtccctcacctgcactgtctctggtggctccatcagcagtggtggttactactggagctggatccgccagcacccagggaagggcctggagtggattgggtacatctattacagtgggagcacctactacaacccgtccctcaagagtcgagttaccatatcagtagacacgtctaagaaccagttctccctgaagctgagctctgtgactgccgcggacacggccgtgtattactgtgcgagagaggggagtaggcagctcgtcccaacctggttcgacccctggggccagggaaccctggtcaccgtctcctcag

SEQ ID NO: 9808 - DNA, 381 bp, Homo sapiens
gaagtgcagctggtgcagtccggagcagaggtgaaaaagcccggggagtctctgaggatctcctgtaagggtgctggatacaggtttaccagttactggatcagctgggtgcgccagatgcccgggaaaggcctggagtggatggggtggattgatcctagtgactcttataccaactacagtccgtccttccaaggccacgtcaccatctcagctgacaagtccaccagcactgcctacctgcagtggagcagcctgaaggcctcggacaccgccatgtattactgtgcgagtccctcgggcgtagattactttgatagtagtggttactactacggtatggacgtctggggccaagggaccacggtcaccgtctcctca

SEQ ID NO: 9809 - DNA, 385 bp, Homo sapiens
caggtgcagctgcaggagtcgggcccaggactggtgaagccttcacagaccctgtccctcacctgcactgtctctggtggctccatcagcagtggtggttactactggagctggatccgccagcacccagggaagggcctggagtggattgggtacatctattacagtgggagcacctactacaacccgtccctcaagagtcgagttaccatatcagtagacacgtctaagaaccagttctccctgaagctgagctctgtgactgccgcggacacggccgtgtattactgtgcgagagtagtgggacggccctatggtttggggagttattatccaaactggttcgacccctggggccagggaaccctggtcaccgtctcctcag

SEQ ID NO: 9810 - DNA, 382 bp, Homo sapiens
caggtccagctggtacagtctggggctgaggtgaagaagcctggggcctcagtgaaggtctcctgcaaggtttccggatacaccctcattgaattatccatacactgggttcgacaggctcctggaaaaggccttgagtggatgggaggttttgagcctgaagatggtgaaacaatctacgcacagaagttccagggcagagtcaccatgcccgaggacacatctacagacacagcctacatggagctgagcagcctgagatctgacgacacggccgtgtattactgtacagcaggagccgtctgtccgcctggggtagactgcccgagggcgacctggttccacccctggggccagggaaccctggtcaccgtctcctcag

SEQ ID NO: 9811 - DNA, 378 bp, Homo sapiens
caggtgcagctggtggagtctgggggaggcgtggtccagcctgggaggtccctgagactctcctgtggagtgtctgggttcaccttcactagatatggcatgcactgggtccgccaggctccaggcaaggggctggagtgggtggcagttatatggtatgatggaagtaataaatactatgcagactccgtgaagggccgattcaccatctccagagacaattccaagaacacgctgtatctgcaaatgaacagcctgagagccgaggacacggctgtgtattactgtgcgagagatggcctttattgtagtggtggaatctgcttcgctatgtatatggacgtctggggccaagggaccacggtcaccgtctcctca

SEQ ID NO: 9812 - DNA, 381 bp, Homo sapiens
caggtcaccttgaaggagtctggtcctgtgctggtgaagcccactgagaccctcacgctgacctgcaccgtctctgggttctcactcatcaatgctaaaatgggtgtgagctggatccgtcagcccccagggagggccctggagtggcttgcacacattttttcggatgacgaaaaatcctacaggccatctctgaagagcaggctctccatctccaaggacacgtccaaaagccaggtggtcctttccatgaccaacatggaccctgtggacacaggcacatattactgtgcacggattaggttggatagcaatggctggtacccggggtactacggtatggacgtctggggccaagggaccacggtcaccgtctcctca

SEQ ID NO: 9813 - DNA, 378 bp, Homo sapiens
gaggtgcagctggtgcagtctggagcagaggtgaaaaagcccggggagtctctgaagatctcctgtaagggttctggatacagctttaccagctactggatcgcctgggtgcgccagatgcccgggaaaggcctggagtggatggggatcatctatcctggtgactctgataccagatacagcccgtccttccaaggccaggtcaccatctcagccgacaagtccatcagcaccgcctacctgcagtggagcagcctgaaggcctcggacaccgccatgtattactgtgcgagactatattgtagtggtggtagttgctattaccgctactacggtatggacgtctggggccaagggaccacggtcaccgtctcctca

SEQ ID NO: 9814 - DNA, 378 bp, Homo sapiens
gaggtgcagctggtgcagtctggagcagaggtgaaaaagcccggggagtctctgaagatctcctgtaagggttctggatacagctttaccaacttctggatcggctgggtgcgccagatgcccgggaaaggcctggagtggatggggatgatttatcctggtgactctgataccagatacagcccgtccttccaaggccaggtcaccatctcagccgacaagtccatcagcaccgcctacctgcagtggagcagcctgaaggcctcggacaccgccatgtattactgtgcgagacaaactacttcgtatagcaatggctggtacacttactccggtatggacgtctggggccaagggaccacggtcaccgtctcctca

SEQ ID NO: 9815 - DNA, 385 bp, Homo sapiens
cagctgcagctgcaggagtcgggcccaggactggtgaagccttcggagaccctgtccctcacctgcactgtctctggtggctccatcagcagtagtagttactactggggctggatccgccagcccccagggaaggggctggagtggattgggagtatctattatagtgggagcacctactacaacccgtccctcaagagtcgagtcaccatatccgtagacacgtccaagaaccagttctccctgaagctgagctctgtgaccgccgcagacacggctgtgtattactgtgcgagactcctgtattactatgatagtagtggttaccagaacccggactggttcgacccctggggccagggaaccctggtcaccgtctcctcag

SEQ ID NO: 9816 - DNA, 378 bp, Homo sapiens
caggtgcacctggtgcagtctggggctgaggtgaagaagcctggggcctcagtgaaggtctcctgcaaggcttctggatacaccttcaccgcctactatatgcactgggtgcgacaggcccctggacaagggcttgagtggatgggatggatcaaccctaacagtggtggcacaaactatgcacagaagtttcagggcagggtcaccctgaccagggacacgtccatcagcacatcctacatggagctgagcaggctgagatctgacgacacggccgtgtattactgtgcgagagatccagtagtcgtagtgggacctactaccttctactacggtatggacgtctggggccaagggaccacggtcaccgtctcctca

SEQ ID NO: 9817 - DNA, 370 bp, Homo sapiens
caggtgcagctgcaggagtcgggcccaggactggtgaagccttcacagaccctgtccctcacctgcactgtctctggtgactccatcagcagtggtgcttactactggagctggatccgccagcacccagggaagggcctggagtggattggatacatcttttacagtgggagcacctactacaacccgtccctcaagagtcgaattaccatatcagtagacacgtctaagaaccagttctccctggaactgacctctgtgactgccgcggacacggccgtgtattactgtgcgagagtccccacggactacgatgactacggaagctttgactactggggccagggaaccctggtcaccgtctcctcag

SEQ ID NO: 9818 - DNA, 378 bp, Homo sapiens
gaggtgcaattagtggagtccgggggagccttagttcagccgggggggtccctgagactctcctgtgcagccactggattgaccgccagtacttattggatgcactgggtccgccaagttccagggaaggggctggtgtgggtctcacgtattaaaagtgatgggaccggcgcaagttacgcggactacgtgaagggccgattcaccgtctccagagacaacgccaagaacacggtgtatctgcaaatgaacagtctgagagccgaggacacggctatgtatcactgtgcaagtggcttagagttcttacgatttatggagtggttatcatatggcatggatgtctggggcccagggaccacggtcgtcgtctcctca

SEQ ID NO: 9819 - DNA, 378 bp, Homo sapiens
caggtccagttggtacagtctggggctgaggtgaagaagcctggggcctcagtgaaggtctcctgtaaggtttccggatacaccctcagtgaattatccatacactgggtgcgacaggctcctggaaaagggcttgagtggatgggaggttttgatcctgaaaatagtgaaacaatctacgcacagaagttccagggcagagtcaccatgaccgaggacacatctacagacacagcctacatggagctgagcagcctgagatctgaggacacggccgtgtattattgtacagcttcctttgttataatgggacccacttacgactactactacggtatggacgtctggggccaagggaccacggtcaccgtctcctca

SEQ ID NO: 9820 - DNA, 378 bp, Homo sapiens
caggtccagctggtacagtctggggctgaggtgaagaagcctggggcctcagtgaaggtctcctgcaaggtttccggatacaccctccctgaattatccatgcactgggtgcgacaggctcctgggagaggccttgagtggatgggaggttttgatcctgaaaatgctgaaacaatctacgcacagaagttccagggcagagtcaccatgaccgaggacacatctgcagacacagcctacatggagctgagcagcctgagatctgacgacacggccgtgtattactgtgcaactgcctttgttgttgtgggacccacttacgacttctactacggcatggacgtctggggccaggggaccacggtcaccgtctcctca

SEQ ID NO: 9821 - DNA, 382 bp, Homo sapiens
caggtgcagctggtggagtctgggggaggcttggtcaagcctggagggtccctgagactctcctgtgtagcctctggattcaccttcagtgaccaatacatgagctggatccgccaggctccagggaaggggctggagtgggtttcatatattagtgttagtgggaccaccatagactacgcacactctgtgcagggccgattcaccatctccagggacaacgccaagaactcagtgtatctgcaaatgaacagcctgagagccgaggacacggccgtgtattactgtgcgagagcccccgatgatagtagtggttatttctcggaccccgcccactactttgactactggggccagggaaccctggtcaccgtctcctcag

SEQ ID NO: 9822 - DNA, 381 bp, Homo sapiens
caggtcaccttgagggagtctggtcctgcgctggtgaaacccacacagaccctcacactgacctgcaccttctctgggttctcactcagcactagtggaatgtgtgtgagctggatccgtcagcccccagggaaggccctggagtggcttgcactcattgattgggatgatgataaatactacagcacatctctgaagaccaggctcaccatctccaaggacacctccaaaaaccaggtggtccttgcaattaccaacatggaccctgtggacacagccacgtattactgtgcacggatgcaagcagtgattactctcgggaactcctactactacggtatggacgtctggggccaagggaccacggtcaccgtctcctca

SEQ ID NO: 9823 - DNA, 381 bp, Homo sapiens
caggtcaccttgagggagtctggtcctgcgctggtgaaacccacacagaccctcacactgacctgcaccttctctgggttctcactcagcagtagtggaatgtgtgtgagttggatccgtcagcccccagggaaggccctggagtggcttgcactcattgattgggatgatgataaatactacagcacatctctgaagaccaggctcaccatctccaaggacacctccaaaaaccaggtggtcctcaaaatgaccaacatggaccctgtggacacaggcacgtattactgtgcacggatgcaaacagtaattagtctcgggagctcctattactacggtatggacgtctggggcctagggaccacggtcaccgtctcctca

SEQ ID NO: 9824 - DNA, 381 bp, Homo sapiens
cagctgcagctgcaggagtcgggcccaggactggtgaagccttcggagaccctgtccctcacctgcactgtctctggtggctccatcagcagtagtagttactactggggctggatccgccagcccccagggaaggggctggagtggattgggagtatctattatagtgggagcacctactacaacccgtccctcaagagtcgagtcaccatatccgtagacacgtccaagaaccagttctccctgaagctgagctctgtgaccgccgcagacacggctgtgtattactgtgcgtcaccgaggtctatagcagtggctggtccttactactactacggtatggacgtctggggccaagggaccacggtcaccgtctcctca

SEQ ID NO: 9825 - DNA, 381 bp, Homo sapiens
cagttgcagttggaggagtcgggcccaggactggtgaagccttcggagaccctgtccctcacctgcactgtctctggtggctccgtcaacagtgggacttactactggggctggatccgccagcccccaggggaggggctggagtggattgggactatcttttatagtgggaatacctactacaacccgtccctcaagagtcgagtcaccatatccgtagacacgtccaagaaccagttctccctgaagctgggctctgtgaccgccgcggacacggctgtctattactgtgcgagagttaaggtttacagttcgcgatattactactactactacggtatggacgtctggggccaagggaccacggtcaccgtctcctca

SEQ ID NO: 9826 - DNA, 378 bp, Homo sapiens
caggtgcagctggtggagtctgggggaggcgtggtccagcctggggggtccctgagactctcctgtgcagcgtctggattcaccttcagtagctatggcatgcactgggtccgccaggctccaggcaaggggctggagtgggtggcatttatacggtatgatggaagtaataaatactatgcagactccgtgaagggccgattcaccatctccagagacaattccaagaacacgctgtatctgcaaatgaacagcctgagagctgaggacacggctgtgtattactgtgcgaaagattgggggatacagctatggcgaaaaagccccacgtggggtatggacgtctggggccaagggaccacggtcaccgtctcctca

SEQ ID NO: 9827 - DNA, 370 bp, Homo sapiens
caggtgcagctgcaggagtcgggcccaggactggtgaagccttcacagaccctgtccctcacctgcactgtctctggtggctccatcagcagtggtggttactactggagctggatccgccagcacccagagacgggcctggagtggattggctacatctataacagtgggatcacctaccacaacccgtccctcaagagtcgagttaccatatcagtagacacgtctaagaaccaattctccctgaaattgatctctgtgactgccgcggacacggccgtgtattactgtgcgagagtccccacggacttcggtgactacggaagctttgactactggggccagggaatcctggtcaccgtctcctcag

SEQ ID NO: 9828 - DNA, 378 bp, Homo sapiens
gaagtgcagctggtggagtctgggggaggcttggtacagcctggcaggtccctgagactctcctgtgcagcctctggattcacctttgatgattttgccattcactgggtccggcaagctccagggaagggcctggagtgggtctcaggtattacttggaatagtggtaccataggctatgcggactctgtgaagggccgattcaccatctccagagacaacgccaagaactccctgtatctgcaaatgaacagtctgagagctgaggacacggccttgtattactgtgcaaaagatatggtggcggatagtagtcgaagagactactactacggtatggacgtctggggccaagggaccacggtcaccgtctcctca

SEQ ID NO: 9829 - DNA, 378 bp, Homo sapiens
gaagtgcagctggtggagtctgggggaggcttggtacagcctggcaggtccctgagactctcctgtgcagcctctggattcacctttgatgattatgccatacactgggtccggcaagctccagggaagggcctggagtgggtctcaggtattagttggaatggtggtgttatagactatgcggcctctgtgaagggccgattcatcatctccagagacaacgccaagaactccctgtttctgcaaatgaacagtctgagagttgaggacacggccttatattactgtgcaaaagaggtagcagcaggggacgaggggggggactactactacggtatggacgtctggggccaagggaccacggtcaccgtctcctca

SEQ ID NO: 9830 - DNA, 379 bp, Homo sapiens
caggtgcagctggtggagtctgggggaggcgtggtccagcctgggaggtccctgagactctcctgtgcagcgtctggattcaccttcagtagctatggcttgcactgggtccgccaggctccaggcaaggggctggagtgggtggcagttatatggtatgatggaagtaataaatactatgcagactccgtgaagggccgattcaccatctccagagacaattccaagaacacgctgtatctgcaaatgaacagcctgagagccgaggacacggctgtgtattactgtgcgagagatagctatgatagtagaattacggatctatggaggaactgtttcgacccctggggccagggaaccctggtcaccgtctcctcag

SEQ ID NO: 9831 - DNA, 379 bp, Homo sapiens
gaggtgcagctgttggagtctgggggaggcttggtacagcctggggggtccctgagactctcctgtgcagcctctggattcacttttagcaactatgccatgagctgggtccgccaggctccagggaaggggctggagtgggtctcagctattagtgatagtggaagtaacgcatactacgcagactccgtgaagggccggttcaccatctccagagacaattccaacaacacgctgtatctgcaaatgatcagcctgagagccggggacacggccgtatattactgcgcgaaagattggggggttctatggtttggggctcaacttagtcaatctttcgacccctggggccagggaaccctggtcaccgtctcctcag

SEQ ID NO: 9832 - DNA, 379 bp, Homo sapiens
caggttcagctggtacagtctggagctgaggtgaagaagcctggggcctcagtgaaggtctcctgcaaggcttctggttacacctttaccagctacggtatcagctgggtgcgccaggcccctggacaagggcttgagtggatgggatggatcagcccttacagtggtaacacagactctgcacagaagctccagggcagactcaccatgaccacagacacatccacgagcacagcctacatggagctgaggagcctgagatctgacgacacggccgtgtattactgtgcgagagtattattatggttcggggagttatcttccgacctgaactggttcgacccctggggccagggaaccctggtcaccgtctcctcag

SEQ ID NO: 9833 - DNA, 379 bp, Homo sapiens
caggtgcagctggtgcagtctggggctgaggtgaagaagcctggggcctcagtgaaggtttcctgcaaggcatctggatacaccttcaccagctactatatgcactgggtgcgacaggcccctggacaagggcttgagtggatgggaataatcaaccctagtggtggtagcacaagctacgcacagaagttccagggcagagtcaccatgaccagggacacgtccacgagcacagtctacatggagctgagcagcctgagatctgaggacacggccgtgtattactgtgcgagaacacaatggcccgtttactatgatagtagtggttataaggggttcgacccctggggccagggaaccctggtcaccgtctcctcag

SEQ ID NO: 9834 - DNA, 378 bp, Homo sapiens
gaggtgcagctggtggagtctgggggaggcctggtcaagcctggggggtccctgagactctcctgtgcagcctctggattcaccttcagtagctatagcatgaactgggtccgccaggctccagggaaggggctggagtgggtctcatccattagtagtagtagtagttacatatactacgcagactcagtgaagggccgattcaccatctccagagacaacgccaagaactcactgtatctgcaaatgaacagcctgagagccgaggacacggctgtgtattactgtgcgagtttgtatagcagcagccaacccgattactactactactacggtatggacgtctggggccaagggaccacggtcaccgtctcctca

SEQ ID NO: 9835 - DNA, 378 bp, Homo sapiens
gaggtgcagctggtggagtctgggggaggcctggtcaagcctggggggtccctgagactctcctgtgcagcctctggattcaccttcagtagctatagcatgaactgggtccgccaggctccagggaaggggctggagtgggtctcatccattagtagtagtagtagttacatatactacgcagactcagtgaagggccgattcaccatctccagagacaacgccaagaactcactgtatctgcaaatgaacagcctgagagccgaggacacggctgtgtattactgtgcgagagccctcgatttttggagtggttaccctcactactactacggtatggacgtctggggccaagggaccacggtcaccgtctcctca

SEQ ID NO: 9836 - DNA, 378 bp, Homo sapiens
gacgtgcagctggtggagtctgggggaggcctggtcaagccgggggggtccctgagactctcctgtgcagcctctggattcatcttcagtaggtccagcatgaactgggtccgccaggctccggggaaggggctggagtggctgtcatacattagtagtactagtagttacatatactacgcagactcagtgcagggccgattcaccatctccagagacaacgccaagaattcactctatctgcaaatgaatagcctgagagccgaggacacggctgtgtattactgtgcgagagaaggctataacgatgttttgactggttatgaggagagaggtctggacgtctggggccaagggaccacggtcaccgtctcctca

SEQ ID NO: 9837 - DNA, 376 bp, Homo sapiens
caggtgcagctacagcagtggggcgcaggactgttgaagccttcggagaccctgtccctcacctgcgctgtctatggtgggtccttcagtggttactactggagctggatccgccagcccccagggaaggggctggagtggattggggaaatcaatcatagtggaagcaccaactacaacccgtccctcaagagtcgagtcaccatatcagtagacacgtccaagaaccagttctccctgaagctgagctctgtgaccgccgcggacacggctgtgtattactgtgcgagggtcctatctgcgagcagcagctggctccgaccgtcgggctggttcgacccctggggccagggaaccctggtcaccgtctcctcag

SEQ ID NO: 9838 - DNA, 367 bp, Homo sapiens
caggtgcagctggtgcagtctggggctgaggtgaagaagcctgggtcctcggtgaaggtctcctgcaaggcttctggaggcaccttcactagttatactatcagttgggtgcgacaggcccctggacaagggcttgagtggatgggagggatcatccctatctttggtacaggaaactacgcacagaagtttcagggcagagtcacgattaccgcggacgaatccacgagcacagcctacatggagctgagtagcctgagatctgaggacacggccgtgtattactgtgcgagagagggggagggagcagttcgtccttttggttttgatatctggggcctagggacaatggtcatcgtctcctcag

SEQ ID NO: 9839 - DNA, 385 bp, Homo sapiens
caggtgcagctgcaggagtcgggcccaggactggtgaagccttcacagaccctgtccctcacctgcgctgtctctggtggctccatcagcagtggtggttactcctggagctggatccggcagccaccagggaagggactggagtggattgggtatatctattacagtgggagcacctactacaacccgtccctcaagagtcgagttaccatatcagtagacacgtccaagaaccagttctccctgaagctgagctctgtgaccgccgcggacacggccgtgtattactgtgccagaaacctgtattactatgatagtagtggttataacccctggtggtacttcgatctctggggccgtggcaccctggtcactgtctcctcag

SEQ ID NO: 9840 - DNA, 379 bp, Homo sapiens
gaagtgcagctggtggagtctgggggagtcgtggtacagcctggggggtccctgagactctcctgtgcagcgtctggattcacctttgatgattatgccatgcactgggtccgtcaagctccggggaagggtctggagtgggtctctcttattagttgggatggtggtagcacctactatgcagactctgtgaagggtcgattcaccatctccagagacaacagcaaaaactccctgtatctacaaatgaacagtctgagagctgaggacaccgccttgtattactgtgcaaaagatgtgaagccctctcaatatagtggatacgatgtcggttactttgactactggggccagggaacccaggtcaccgtctcctcag

SEQ ID NO: 9841 - DNA, 379 bp, Homo sapiens
caggtgcagctggtgcagtctggggctgaggtgaagaagcctggggcctcagtgaaggtttcctgcgaggcatctggatacaccttcaccacctactatatacactgggtgcgacaggcccctgggcaagggcttgagtggatgggaataatcaaccctagtggtggtaccacaagctacgcacagaagttccagggcagagtcaccatgaccagggacacgtccacgagcacagtctacatggagctgagcagcctgagatctgaggacacggccgtatatttctgtgcgagagttgggtcccattactatgatggtagtggttattacccgggactcgactactggggccagggaaccctggtcaccgtctcctcag

SEQ ID NO: 9842 - DNA, 379 bp, Homo sapiens
caggtgcagctggtgcagtctggggctgaggtgaagaagcctggggcctcagtgagggtttcctgcaaggcatctggatacaccttcaccacgtactttatgcactgggtgcgacaggcccctggacaagggcttgagtggatgggaataatgaaccctagtgatggtaccgcaagctacgcacagaagttccagggcagagtcaccatgaccagcgacacgtccacgagcacagtctacatggagttgagcagcctgagatctgaggacacggccgtgtattactgtgcgagaccggaccaaccgtctaccagtggctggtattccgccctggcttttgactactggggccagggaaccctggtcaccgtctcctcag

SEQ ID NO: 9843 - DNA, 377 bp, Homo sapiens
caggtgcagctggtggagtctgggggaggcgtggtccagcctggggggtccctgagactctcctgtgcagcgtctgcattcaccttcagtagttatggcatgcactgggtccgccaggctccaggcaagggcctggagtggatgacatttatacggtatgatggaagtaataaatactatgcagactccgtgaagggccggttcaccatctccagagacaattccaagaacacgctgtatctgcaaatgaacagcctgagagttgaggacacggctgtgtattactgtgcgaaagatgggggcgttaggcgaggctacgaccccgatcagtactactttgactactggggccagggaaccctggtcaccgtctcctc

SEQ ID NO: 9844 - DNA, 379 bp, Homo sapiens
caggtgcagctggtggagtctgggggaggcgtggtccagcctgggaggtccctgagactctcctgtgcagcctctggattcaccttcagtagctatggcatgcactgggtccgccaggctccaggcaaggggctggagtgggtggcagttatatcatatgatggaagtaataaatactatgcagactccgtgaagggccgattcaccatctccagagacaattccaagaacacgctgtatctgcaaatgaacagcctgagagctgaggacacggctgtgtattactgtgcgaagccttcgcggtcctactatgatagtagtggttattcgtactactttgactactggggccagggaaccctggtcaccgtctcctcag

SEQ ID NO: 9845 - DNA, 379 bp, Homo sapiens
caggtgcagctggtggagtctgggggaggcgtggtccagcctgggaggtccctgagactctcctgtgcagcctctggattcaccttcagtagctatggcatgcactgggtccgccaggctccaggcaaggggctggagtgggtggcagttatattatatgatggaagtaataaagactatgcagactccgtgaagggccgattcaccatctccagagacaattccaagaacaccctgtatctgcaaatgagcagcctgagagctgaggacacggctgtgtattactgtgcgaaaaggcagggcttatattgtggtggtgactgctatctacctcactttgactactggggccagggaaccctggtcaccgtctcctcag

SEQ ID NO: 9846 - DNA, 379 bp, Homo sapiens
caggtgcagctggtggagtctgggggaggcgtggtccagccgggggggtccctgagactctcctgtgcagcgtctggattcaccttcagtaactatggcatgcactggctccgccaggctccaggcaaggggctggagtgggtgacatttatacggtatgatggaaataataaatactatgcagactccgtgaagggccgattcaccatctccagagacaattccaagaatacgttgtatctgcaaatgaacagcctgagagctgaggacacggctgtgtatttctgtgcgaaagatccgcgacaatattgtagtactacgatctgctatgaggccttctattactggggccagggaaccctggtcaccgtctcctcag

SEQ ID NO: 9847 - DNA, 379 bp, Homo sapiens
gaggtgcagctggtgcagtctggagcagaggtgaaaaagcccggggagtctctgaagatctcctgtaagggttctggatacagctttaccaactactggatcggctgggtgcgccagatgcccgggaaaggcctggagtggatggggatcatctatcctgatgactctgataccagatacagcccgtccttcgaaggccaggtcaccatctcagccgacaagtccatcagcaccgcctacctgcagtggagcagcctgaaggcctcggacaccgccatgtattactgtgcgagacggtctttccgttactttggttcggggacttatcttaattactttgactactggggccagggaaccctggtcaccgtctcctcag

SEQ ID NO: 9848 - DNA, 367 bp, Homo sapiens
gaggtgctgctggtgcagtctggagcagaggtgaaaaagcccggggagtctctgaagatctcctgtaagggttctggatacagctttagcaaccagtggatcggctgggtgcgccagatgcccgggaaaggcctggagtggatggggatcatctatccctatgactctgataccaaatacagcccgtctttcgaaggccaggtcaccatctcagccgacaagtctatcagcaccgcctacctgcagtggagcagcctgaaggcctcggacaccgccatgttttactgtgcgaccacggggtgggatactagtggctggtattcctttgactactggggccagggaaccctggtcaccgtctcctcag

SEQ ID NO: 9849 - DNA, 379 bp, Homo sapiens
gaagtgcagctgatggagtctgggggaggcttggtacggcctggcaggtccctgagactctcctgtgcagcctctggattcacctttgatgagtatgccatgcactgggtccggcaagctccagggaagggcctggagtgggtctcaggttctacttggaatagtggtaccataggctatgcggactctgtgaagggccgattcaccatctccagagacaacgccaagaactccctgtatctgcaaatgaacagtctgagagctgaggacacggccttgtattactgtgcaaaagatatttccccagcacctggtactacttgggaagaatatgcttttgatatctggggccaagggacaatggtcaccgtctcttcag

SEQ ID NO: 9850 - DNA, 376 bp, Homo sapiens
gaggtgcagctggtggagtctggaggaggcttgatccagcctggggggtccctgagactctcctgtgcagcctctgggttcaccgtcagtagcaactacatgagctgggtccgccaggctccagggaaggggctggagtgggtctcagttatttatagcggtggtagcacatactacgcagactccgtgaagggccgattcaccatctccagagacaattccaagaacacgctgtatcttcaaatgaacagcctgagagccgaggacacggccgtgtattactgtgcgagagatccaccgtcccattactatgatagtagtggtcgtgatgcttttgatatctggggccaagggacaatggtcaccgtctcttcag

SEQ ID NO: 9851 - DNA, 376 bp, Homo sapiens
caggtgcagctgcaggagtcgggcccaggactggtgaagccttcggagaccctgtccctcacctgcacggtctctggtggccccatcagtacttactactggacctggatccggcagcccccagggaagggactggagtggattggttatatccattccagtgggagcaccaactacaacccctccctcaagagtcgagtcaccatatcagtagacacgtccaagaatcagttctccctgaagctgagctctgtgaccgctgcggacacggccgtgtattactgtgcgagatccctgggggtcgatattttgactggttattacgaagaggcctttgactactggggccagggaaccctggtcaccgtctcctcag

SEQ ID NO: 9852 - DNA, 382 bp, Homo sapiens
cagctgcagctgcaggagtcgggcccaggactggtgaagccttcggagaccctgtccctcacctgcactgtctctggtggctccatcagcagtagtagttactactggggctggatccgccagcccccagggaaggggctggagtggattgggagtatctattatagtgggagcacctactacaacccgtccctcaagagtcgagtcaccatatccgtagacacgtccaagaaccagttctccctgaagctgagctctgtgaccgccgcagacacggctgtgtattactgtgcgagaccccattactatggttcggggagttaccgccctggtgggtacttcgatctctggggccgtggcaccctggtcactgtctcctcag

SEQ ID NO: 9853 - DNA, 379 bp, Homo sapiens
gaggtgcagctggtggagtctgggggaggcctggtcaagcctggggggtccctgagactctcctgtgcagcctctggattcaccttcagtagctatagcatgaactgggtccgccaggctccagggaaggggctggagtgggtctcatccattagtagtagtagtagttacatatactacgcagactcagtgaagggccgattcaccatctccagagacaacgccaagaactcactgtatctgcaaatgaacagcctgagagccgaggacacggctgtgtattactgtgcggttttttattatgattacgtttgggggagttatcgttatccccttttagactactggggccagggaaccctggtcaccgtctcctcag

SEQ ID NO: 9854 - DNA, 379 bp, Homo sapiens
gaggtgcagctggtggagtctgggggaggcctggtcaagcctggggggtccctgagactctcctgtgcagcctctggattcaccttcagtaactattacataaactgggtccgccaggctccagggaaggggctggagtgggtctcatccattagtagtactagtagttacatatactacgcagactcagtgaagggccgattcaccatctccagagacaacgccaagaactcactgtatctgcaaatgaacagcctgagagccgaggacacggctgtgtattactgtgcgagagatttacggtattattatgatagtagtggttatcacgggttaattggctactggggccagggaaccctggtcaccgtctcctcag

SEQ ID NO: 9855 - DNA, 379 bp, Homo sapiens
gaggtgcagctggtggagtctgggggaggcctggtcaagcctggggggtccctgagactctcctgtgcagcctctggattcaccttcagtagctatagcatgaactgggtccgccaggctccagggaaggggctggagtgggtctcatccattagtagtagtagtagttacatatactacgcagactcagtgaagggccgattcaccatctccagagacaacgccaagaactcactgtatctgcaaatgaacagcctgagagccgaggacacggctgtgtattactgtgcgagaggtgtgggggggttacgatttttggagtggttattgaacgagtttgactactggggccagggaaccctggtcaccgtctcctcag

SEQ ID NO: 9856 - DNA, 379 bp, Homo sapiens
gaggtgcagctggtggagtctgggggaggcctggtcaagcctggggggtccctgagactctcctgtgcagcctctggattcaccttcagtagctatagcatgaactgggtccgccaggctccagggaaggggctggagtgggtctcatccattagtagtagtagtagttacatatactacgcagactcagtgaagggccgattcaccatctccagagacaacgccaagaactcactgtatctgcaaatgaacagcctgagagccgaggacacggctgtgtattactgtgcgagagatcagcagggcagtggctggtacgatgagggagaatactactttgactactggggccagggaaccctggtcaccgtctcctcag

SEQ ID NO: 9857 - DNA, 387 bp, Homo sapiens
caggtacagctgcagcagtcaggtccaggactggtgaagccctcgcagaccctctcactcacctgtgccatctccggggacagtgtctctagcaacagtgctgcttggaactggatcaggcagtccccatcgagaggccttgagtggctgggaaggacatactacagctccaaatggtataatgattatgcagtatctgtgaaaagtcgaataaccatcaacccagacacatccaagaaccagttctccctgcagctgaactctgtgactcccgaggacacggctgtatattactgtgcaagaggtccacttatagtggtaattacccgatactactactacgctatggacgtctggggccaagggaccacggtcaccgtctcctca

SEQ ID NO: 9858 - DNA, 367 bp, Homo sapiens
gaggtgcagctggtgcagtctggagcagaggtgaaaaagcccggggagtctctgaagatctcctgtaagggttctggatacagctttaccagctactggatcggctgggtgcgccagatgcccgggaaaggcctggagtggatggggatcatctatcctggtgactctgataccagatacagcccgtccttccaaggccaggtcaccatctcagccgacaagtccatcagcaccgcctacctgcagtggagcagcctgaaggcctcggacaccgccatgtattactgtgcgaggatcgtcgattactatgatagtagtggtttttgggactactggggccagggaaccctggtcaccgtctcctcag

SEQ ID NO: 9859 - DNA, 385 bp, Homo sapiens
gaggtgcagctggtggagtccgggggaggcttggtccagcctggggggtccctgaaactctcctgtgcagcctctgggttcaccttcagtggctctgctatgcactgggtccgccaggcttccgggaaagggctggagtgggttggccgtattagaagcaaagctaacagttacgcgacagcatatgctgcgtcggtgaaaggcaggttcaccatctccagagatgattcaaagaacacggcgtatctgcaaatgaacagcctgaaaaccgaggacacggccgtgtattactgtactacccagaaaaagaattactatgatagtagtggttatcaagaatacttccagcactggggccagggcaccctggtcaccgtctcctcag

SEQ ID NO: 9860 - DNA, 358 bp, Homo sapiens
gaggtgcagctggtggagtctgggggaggcttggtccagcggagggggtccctgagactctcctgtgtagcctctggattcacctttagtagctattggatgacctgggtccgccaggctccagggaaggggctggagtgggtggccaacataaagcaagatggaggtgagaaatactatgtggagtctgtgaagggccgattcaccatctccagagacaacgccaagaactcactgtatctgcaagtgaacagcctgagagtcgaggacacggctgtgtattactgtgcgagagtgggtaggagcagctggtactttgactcctggggccagggaaccctggtcaccgtctcctcag

SEQ ID NO: 9861 - DNA, 358 bp, Homo sapiens
gaggtgcagttggtggagtctgggggaggcttggtccagcctggggggtccctgagactctcctgtgcagcctctggattcacctttagtagttcttggatgagctgggtccgccaggctccagggaaggggctggagtgggtggccaacataaagcaagatggaggtgagaaatactatggggactctgtgaagggccgattcttcatctccagagacaacgccaagaactcactgtatctgcaaatgaacagcctgagagccgaggacacggctgtatattattgcgaccttgtctcctccagtgactggtcctttgactactggggccagggaaccctggtcaccgtctcctcag

SEQ ID NO: 9862 - DNA, 355 bp, Homo sapiens
caggtgcagctgcaggagtcgggcccaggactggtgaagccttcggagaccctgtccctcacctgcactgtctctggtggctccatcagtagttactactggagctggatccggcagcccccagggaagggactggagtggattgggtatatctattacagtgggagcaccaactacaacccctccctcaagagtcgagtcaccatatcagtagacacgtccaagaaccagttctccctgaagctgagctctgtgaccgctgcggacacggccgtgtattactgtgcgatgagtagtggttattactacgaatttgactactggggccagggaaccctggtcaccgtctcctcag

SEQ ID NO: 9863 - DNA, 361 bp, Homo sapiens
caggtgcagctgcaggagtcgggcccaggactggtgaagccttcggagaccctgtccctcacctgcactgtctctggtggctccgtcagcagtggtagttactactggagctggatccggcagcccccagggaagggactggagtggattgggtatatctattacagtgggagcaccaactacaacccctccctcaagagtcgagtcaccatatcagtagacacgtccaagaaccagttctccctgaagctgagctctgtgactgccgcggacacggccgtgtattactgtgcgagatcgggagtggctacgaacccctttgactactggggccagggaaccctggtcaccgtctcctcag

SEQ ID NO: 9864 - DNA, 358 bp, Homo sapiens
caggtgcagctggtgcagtctggggctgaggtgaagaagcctggggcctcagtgaagatttcctgcaaggcatctggatacatcttcagtaactactatatgcattgggtgcgacaggcccctggacaagggcttgagtggatgggaataatcaactctagtggtactagtacaagctacgcacagaagtttcagggcagagtcaccatgaccagggacacgtccacgagcacagtttacatggagttgagcagcctgagatctgaggacacggccgtgtatttctgtgcgagagacagcggtattgccggttactttgactactggggccagggaaccctggtcaccgtctcctcag

SEQ ID NO: 9865 - DNA, 364 bp, Homo sapiens
gaggttcagctggtggagtctgggggaggcttggtaaagcctggggggtcccttagactctcctgtgcagcctctggattcagtttcagtgacgcctggatgagctgggtccgccaggctccagggaaggggctggagtgggttggccttattaaaaatgatgttaatggtgggacagcagactacgctgcacccgtgaaaggcagattcaccatctcaagagatgattcaaaaaacacgctgtatctgcaattgaacagcctgaaaacggaggacacagccgtgtattactgtaccacagacggggctctgacgtattcgggggactactggggccagggaaccctggtcaccgtctcctcag

SEQ ID NO: 9866 - DNA, 361 bp, Homo sapiens
caggtgcggctgcaggagtcgggcccaggattggtgaagccttcacagaccctgaccctcacctgcattgtctctggtggctccatcagcagtcctggttactactggaattggatccgccaacacccagggaagggcctggagtggattgggaacatctatcacagtggggacacctactacaacccgtccctcaggagtcgagttaccttttcagtagacacgtctaagaaccagttgtccctgaagctgacctctgtgactgccgcggacacggccgtgtattactgtgcgagagatctgggggactaccgtgcccttggctactggggccggggaaccctggtcaccgtctcctcag

SEQ ID NO: 9867 - DNA, 361 bp, Homo sapiens
caggtgcagctgcaggagtcgggcccaggactggtgaagccttcacagaccctgtccctcacctgcactgtctctggtggctccatcagcagtggtggtttctactggacctggatccgccagcacccagggaagggcctggagtggactgggtacattgattacagtgggagcacctactaccacccgtccctcaagagtcgacttaccatatcactggacacgtctaagaaccagttctccctgaagctgagttctgtgactgccgcggacacggccgtgtattactgtgcgagaggtagtggttatcccccgttctttgactactggggccagggaaccctggtcaccgcctcctcag

SEQ ID NO: 9868 - DNA, 361 bp, Homo sapiens
caggtgcagctacagcagtggggcgcaggactgttgaagccttcggagaccctgtccctcacctgcactgtctctggtggctccatcagcagttatggttactactggagctggatccgccagcacccagggaagggcctggagtggattgggtacatctattacagtgggagcacctactacaacccgtccctcaagagtcgagttaccatatcagtagacacgtctaagaaccagttctccctgaagctgagctctgtgactgccgcggacacggccgtgtattactgtgcgagatccctggcgggagctaccttctttgactactggggccagggaaccctggtcaccgtctcctcag

SEQ ID NO: 9869 - DNA, 367 bp, Homo sapiens
gaggtgcagctggtgcagtctggagcagaggtgaaaaagcccggggagtctctgaagatctcctgtaaggcttctggatacagctttaccacctactggatcgcctgggtgcgccagatgcccgggaaaggcctggagtggatggggatcatctatcctgataactctgataccagatacagcccgtccttccaaggccaggtcaccatctcagccgacaagtccatcagcaccgcctacctgcagtggggcagcctgaaggcctcggacaccgccatgtattactgtgcgaggatcgtcgattacgctgatagtagtggtttttgggactcctggggccagggaaccctggtcaccgtctcctcag

SEQ ID NO: 9870 - DNA, 358 bp, Homo sapiens
caggtgcagctggtgcagtctggggctgaggtgaagaagcctgggtcctcggtgaaggtctcctgcaaggcttctggaggcaccttcagcagctatgctatcagctgggtgcgacaggcccctggacaagggcttgagtggatgggagggatcatccctatctttggtacagcaaactacgcacagaagttccagggcagagtcacgattaccgcggacgaatccacgagcacagcctacatggagctgagcagcctgagatctgaggacacggccgtgtattactgtgcgagtaaggggttcggggagttattctttgactactggggccagggaaccctggtcaccgtctcctcag

SEQ ID NO: 9871 - DNA, 358 bp, Homo sapiens
caggtgcagctggtgcagtctggggctgaggtgaagaagcctgggtcctcggtgaaggtctcctgcaaggcttctggaggcaccttcagcagctatgctatcagctgggtgcgacaggcccctggacaagggcttgagtggatgggagggatcatccctatctttggtacagcaaactacgcacagaagttccagggcagagtcacgattaccgcggacgaatccacgagcacagcctacatggagctgagcagcctgagatctgaggacacggccgtgtattactgtgcgaggcagtggctggtacgagggtactttgactactggggccagggaaccctggtcaccgtctcctcag

SEQ ID NO: 9872 - DNA, 358 bp, Homo sapiens
caggtgcaactggtggagtctgggggaggcgtggtccagcctgggaggtccctgagactctcctgtgcagcctctggattcaccttcagtagctatgctatgcactgggtccgccaggctccaggcaaggggctggagtgggtggcagttatatcatatgatggaagtaataaatactacgcagactccgtgaagggccgattcaccatctccagagacaactccaagaacacgctgtatctgcaaatgaacagcctgagagctgaggacacggctgtgtattactgtgcgagggatagtagtggttattactactttgactactggggccagggaaccctggtcaccgtctcctcag

SEQ ID NO: 9873 - DNA, 358 bp, Homo sapiens
caggtgcagctggtggagtctgggggaggcgtggtccagcctggggggtccctgagactctcctgtgtagcgtctggattccccttcagtgcctatggcatgcactgggtccgccaggctccaggcaaggggctggagtgggtgacatttatacggtatgatggaattaacaaatactatgcagactccgtgaagggccgattcaccatctccagagacaattccaagaacacgctgtatctgcaaatgaacagcctgagagctgaggacacggctgtctatttctgtgcacgatattttgactggttattacctattgactactggggccagggaaccctggtcaccgtctcctcag

SEQ ID NO: 9874 - DNA, 358 bp, Homo sapiens
gaggtgcagctggtgcagtctggagcagaggtgaaaaagcccggggagtctctgaagatctcctgtaagggttctggatacagctttaccagctactggatcggctgggtgcgccagatgcccgggaaaggcctggagtggatggggatcatctatcctggtgactctgataccagatacagcccgtccttccaaggccaggtcaccatctcagccgacaagtccatcagcaccgcctacctgcagtggagcagcctgaaggcctcggacaccgccatgtattactgtgcgagacggggggtttggggagttgttattgactactggggccagggaaccctggtcaccgtctcctcag

SEQ ID NO: 9875 - DNA, 358 bp, Homo sapiens
gaggtgcagctggtgcagtctggagcagaggtgaaaaagcccggggagtctctgaagatctcctgtaagggttctggatacagctttaccaactattggatcggctgggtgcgccagatgcccgggaaaggcctggagtggatggggatcatctatcctggtgactctgataccagatacagcccgtccttccaaggccaggtcaccatctcagccgacaagtccatcagcaccgcctacctgcagtggagcagcctgagggcctcggacaccgccatgtattactgtgcgagacggtcttactatgactactactttgactactggggccagggaaccctggtcaccgtctcctcag

SEQ ID NO: 9876 - DNA, 203 bp, Homo sapiens
tggtactgctggtgacacatactatccaggctccgtggagggccgattcaccatctccagagaaaatgccaagaactccttgtatcttcaaatgaacagcctgagagccggggacacgggtgtgtattactgtgcaagagggctagcgggagctccgtcttttgactcctggggtcagggaaccctggtcaccgtctcctcag

SEQ ID NO: 9877 - DNA, 376 bp, Homo sapiens
caggtgcagctacagcagtggggcgcaggactgttgaagccttcggagaccctgtccctcacctgcgctgtctatggtgggtccttcagtggttactactggagctggatccgccagcccccagggaaggggctggagtggattggggaaatcaatcatagtggaagcaccaactacaacccgtccctcaagagtcgagtcaccatatcagtagacacgtccaagaaccagttctccctgaagctgagctctgtgaccgccgcggacacggctgtgtattactgtgcgagaggccgccgtaagcagtggctggttttggctcgatcgaaacctgatgactactggggccagggaaccctggtcaccgtctcctcag

SEQ ID NO: 9878 - DNA, 358 bp, Homo sapiens
gaggtgcagctggtggagtctgggggaggcctggtcaagcctggggggtccctgagactctcctgtgcagcctctggattcaccttcagtagctatagcatgaactgggtccgccaggctccagggaaggggctggagtgggtctcatccattagtagtagtagtagttacatatactacgcagactcagtgaagggccgattcaccatctccagagacaacgccaagaactcactgtatctgcaaatgaacagcctgagagccgaggacacggctgtgtattactgtgcgagattacggtatggtttgggccctgttgactactggggccagggaaccctggtcaccgtctcctcag

SEQ ID NO: 9879 - DNA, 358 bp, Homo sapiens
gaggtgcagctgttggagtctgggggaggcttggtacagcctggggggtccctgagactctcctgtgcagcctctggattcacctttagcagctatgccatgagctgggtccgccaggctccagggaaggggctggagtgggtctcagctattagtggtagtggtggtagcacatactacgcagactccgtgaagggccggttcaccatctccagagacaattccaagaacacgctgtatctgcaaatgaacagcctgagagccgaggacacggccgtatattactgtgcgaagaagtgggagctactacacccctttgactactggggccagggaaccctggtcaccgtctcctcag

SEQ ID NO: 9880 - DNA, 367 bp, Homo sapiens
gaggtgcagctgttggagtctgggggaggcttggtacagcctggggggtccctgagagtctcctgtgcagcctctggattcaaatttaacaattatgccatgaactgggtccgccaggttccagggaaggggctggagtgggtctcaggtattagtggtagtgatggtagaacatattacggagactccgtgaagggccggttcaccatctccagagacaattccaagaacacgctgtctctgcaaatgaacagcctgagagccgaggacacggccatatactactgtgcgaaagatctatacagtaccaggtcgtctcgcaactttgactactggggccagggaaccctggtcagcgtctcctcag

SEQ ID NO: 9881 - DNA, 355 bp, Homo sapiens
gagttgcagctgttggagtctgggggaggcttggtccagcctggggggtccctgagactctcctgtgcagcctctggcttctcctttagcagctatgccatgagctgggtccgccaggctccagggaaggggctggactgggtctcaactattattagtgttgggaccacatactacgcagactccgtgaagggccggttcaccatctccagagacaattccaagaacacgctgtatctgcaaatgaacagcctgagagccgaggacacggccgtatattactgtgcgaaaccccccctgggtccctggtactttgactcctggggccagggaaccctggtcaccgtctcctcag

SEQ ID NO: 9882 - DNA, 358 bp, Homo sapiens
caggtgcagctggtgcagtctggggctgaggtgaagaagcctgggtcctcggtgaaggtctcctgcaaggcttctggaggcaccttcagcagctatgctatcagctgggtgcgacaggcccctggacaagggcttgagtggatgggagggatcatccctaattttggtactacaaactacgcacagaagttccagggcagagtcacgattaccgcggacgaatccacgagaatagcctacatggagctgagcagcctgagatctgaggacacggccgtatattactgtgcgagagagtcggttatgatggctgctgttgatatctggggccaagggacaatggtcaccgtctcttcag

SEQ ID NO: 9883 - DNA, 358 bp, Homo sapiens
gaggtgcagctggtggagtccgggggaggcttagttcagcctggggggtccctgagactctcctgtgcagcctctggattcaccttcagtaactactggatgcactgggtccgccaagttccagggaaggggctggtgtgggtctcacgtattactagtgatgggactagaacaaactacgcggactccgtgaagggccgattcaccatctccagagacaacgccaagaacacgctgtatctgcaaatgaacagtctgagagccgaggacacggctgtctattactgtgcaagagctgagtgggagcgcggcaactttgactactggggccagggaaccctggtcaccgtctcctcag

SEQ ID NO: 9884 - DNA, 355 bp, Homo sapiens
caggtgcagctgcaggagtcgggcccaggactggtgaagccttcggagaccctgtccctcacctgcactgtctctggtggctccatcagtagttactactggagctggatccggcagcccccagggaagggactggagtggattgggtatatctattacagtgggagcaccaactacaacccctccctcaagagtcgagtcaccatatcagtagacacgtccaagaaccagttctccctgaagctgagctctgtgaccgctgcggacacggccgtgtattactgtgcgagagtgttcagctggcgagatgcttttgatatctggggccaagggacaatggtcaccgtctcttcag

SEQ ID NO: 9885 - DNA, 361 bp, Homo sapiens
cagctgcagctgcaggagtcgggcccaggactggtgaagccttcggagaccctgtccctcacctgcactgtctctggtggctccatcagcagtagtagttactactggggctggatccgccagcccccagggaaggggctggagtggattgggagtatctattatagtgggagcacctactacaacccgtccctcaagagtcgagtcaccatatccgtagacacgtccaagaaccagttctccctgaagctgagctctgtgaccgccgcagacacggctgtgtattactgtgcgagacacgagcagtggctggatgcttttgatatctggggccaagggacaatggtcaccgtctcttcag

SEQ ID NO: 9886 - DNA, 360 bp, Homo sapiens
cagctgcagctgcaggagtcgggcccaggactggtgaagccttcggagaccctgtccctcacctgcactgtctctggtggctccatcagcagtagtagttactactggggctggatccgccagcccccagggaaggggctggagtggattgggagtatctattatagtgggagcacctactacaacccgtccctcaagagtcgagtcaccatatccgtagacacgtccaagaaccagttctccctgaagctgagctctgtgaccgccgcagacacggctgtgtattactgtgcgggatacttcgagtatccctacggtatggacgtctggggccaagggaccacggtcaccgtctcctca

SEQ ID NO: 9887 - DNA, 360 bp, Homo sapiens
caggtgcagctgcaggagtcgggcccaggactggtgaagccttcacagaccctgtccctcacctgcgctgtctctggtggctccatcagcagtggtggttactcctggagctggatccggcagccaccagggaagggactggagtggattgggtatatctattacagtgggagcacctactacaacccgtccctcaagagtcgagttaccatatcagtagacacgtccaagaaccagttctccctgaagctgagctctgtgaccgccgcggacacggccgtgtattactgtgccagagggtatttctactactacggtatggacgtctggggccaagggaccacggtcaccgtctcctca

SEQ ID NO: 9888 - DNA, 357 bp, Homo sapiens
gaggtgcagctggtggagtctgggggaggcttggtccagccggggggtccctgagactctcctgtgcagcctctagattcacctttaggagctattggatgagctgggtccgccaggctccagggaaggggctggagtgggtggccaacataaagcaagatggaggtgagaaatactatgtggactctgtgaagggccgattcaccatctccagagacaacgccaagagctcactgtatctacaaatgaacagcctgagagccgaggacacggccgtgtattattgtgcgggacacgagtgggtggggggcgcttttgatatctggggccaagggacaatggtcaccgtctcttcag

SEQ ID NO: 9889 - DNA, 357 bp, Homo sapiens
gaggtgcagctggtggagtctgggggaggcttggtccagcctggggggtccctgagactctcctgtgcagcctctggattcaccttcagtagctatagcatgaactgggtccgccaggctccagggaaggggctggagtgggtttcatacattagtagtagtagtagtaccatatacaacgcagactctgtgaagggccgattcaccatctccagagacaatgccaagaactcactgtatctgcaaatgaacagcctgagagacgaggacacggctgtgtattactgtgcgagacttggggtggtgaactacggtatggacgtctggggccaagggaccacggtcaccgtctcctca

SEQ ID NO: 9890 - DNA, 355 bp, Homo sapiens
gaggtgcagctggtggagtctgggggaggcttggtacagccgggggggtccctgagactctcctgtgcagcctctggattcagcttcagtagctacgacatgcactgggtccgccaagctacaggaaaaggtctggagtgggtctcagctattggtcttgctggtgacacatactatccaggctccgtgaagggccgattcaccatctccagagaaaatgccaagaactccttctatcttcaaatgaacagcctgagagccggggacacggcggtgtattactgtacacgagtgtgggggagagggggctacttcgatctctggggccgtggcaccctggtcactgtctcctcag

SEQ ID NO: 9891 - DNA, 367 bp, Homo sapiens
gaggtgcagctgttggagtctgggggaggcttggtacagcctggggggtccctgagactctcctgtgcagcctctggattcacctttagcagctatgccatgagctgggtccgccaggctccagggaaggggctggagtgggtctcagctattagtggtagtggtggtagcacatactacgcagactccgtgaagggccggttcaccatctccagagacaattccaagaacacgctgtatctgcaaatgaacagcctgagagccgaggacacggccgtatattactgtgcgaaagatcagggcagcagcagctggtactcctggttcgacccctggggccagggaaccctggtcaccgtctcctcag

SEQ ID NO: 9892 - DNA, 358 bp, Homo sapiens
caggtgcagctggtggagtctgggggaggcgtggtccagcctgggaggtccctgagactctcctgtgcagcgtctggattcagtttcagtagctatggcatgcactgggtccgccaggctccaggcaaggggctggagtgggtggcagttatatggtttgagggaagtaataaatattatgcagactccgtgaagggccgattcaccatctccagagacatttccaagaacacggtgtatctgcaaatgaacagcctgagagccgaggacacggctgtgtattactgtgcgagaggcggttacggaccatactactttgactactggggccagggaacgcaggtcaccgtctcctcag

SEQ ID NO: 9893 - DNA, 354 bp, Homo sapiens
gaggtgcagctggtggagtctggaggaggcttgatccagcctggggggtccctgagactctcctgtgcagcctctgggttgaccgtcagtagcaactacatgagctgggtccgccaggctccagggaaggggctggagtgggtctccgtcatttatagcggtggtagcacattctacgcagactccgtgaagggccgattcaccatctccagagacaattccaagaacacgctgtatcttcaaatgaacagcctgagagccgaggacacggccgtgtattactgtgcgagagggccagcgggattctacggtatggacgtctggggccaagggaccacggtcaccgtctcctca

SEQ ID NO: 9894 - DNA, 354 bp, Homo sapiens
gaggtgcagctggtggagtctggaggaggcttgatccagccgggggggtccctgagactctcctgtgcagcctctgggctcaccgtcagtagcaactacatgacctgggtccgccaggctccagggaaggggctggagtgggtctcagttatttatagcggcggtagtacattctacgcagactccgtgaagggccgtttcaccatctccagagacaattccaagaacacgctgtatcttcaaatgaacagcctgagagccgaggacacggccgtgtattactgtgcgagggagttgtatagtgcgggggggatggacgtctggggccaagggactacggtcaccgtctcctca

SEQ ID NO: 9895 - DNA, 388 bp, Homo sapiens
gaagtgcagctggtgcagtccggagcagaactaaaaaagcccggggagtctctgaggatctcctgtaagggttctggatacagctttaccagctactggatcagctgggtgcgccagatgcccgggaaaggcctggagtggatggggaggattgatcctagtgactcttataccaactacagcccgtccttccaaggccacgtcatgatctcagctgacaagtccatcagcactgcctacctgcagtggagcagcctgaaggcctcggacaccgccatgtattattgtgcgagacatggattaacttgtggtagtaccagttgctatctggatctcttgaactggttcgacccctggggccagggaaccctggtcaccgtctcctcag

SEQ ID NO: 9896 - DNA, 355 bp, Homo sapiens
gaggtgcagctggtggagtctggaggaggcttgatccagcctggggggtccctgagactctcctgtgcagcctctgggttcaccgtcagtaggaactacatgagctgggtccgccaggctccagggaaggggctggagtgggtctcagttatttatagcggtgggagtacattctacgcagactccgtgaagggccgattcaccatctccagagacaattccaagaacacgctgtatcttcaaatgaacatcctgggagccgatgacacggccgtttattactgtgcgagactgccgtataccaacagggggggcgaggcctggggcctgggaaccctggtcaccgtctcctcag

SEQ ID NO: 9897 - DNA, 388 bp, Homo sapiens
caggtgcagctggtggagtctgggggaggcgtggtccagcctgggaggtccctgagactctcctgtgcagcctctggattcaccttcagtagctatgctatgcactgggtccgccaggctccaggcaaggggctggagtgggtggcagttatatcatatgatggaagtcttacatactacacagactccgtgaagggccgattcaccatctccagagacaattccaagaacacgctgtatctgcaaatgagcagcctgagagctgaagacacggctgtctattactgtgcgagagatcgcggcacactcctaacgctctatagcagcagctggcaccgggcagggctcgacccctggggccagggaaccctggtcgccgtctcctcag

SEQ ID NO: 9898 - DNA, 388 bp, Homo sapiens
caggtgcagctggtggagtctgggggaggcgtggtccagcctgggaggtccctgagactctcctgtgcagcctctggattcaccttcagtagctatgttatgtactgggtccgccaggctccaggcaaggggctggagtgggtggcaattatatcacatgatggcagtaataaatattacacagactccgtgaagggccgattcaccatctccagagacaattccaagaacaccctgtatctgcaaatgaacagcctgagaactgaggacacggctatatattactgtgcgagagatcgggaaaagtccccagcaatatggttcggggagttatacgtcaactggctcgacccctggggccagggaaccctggtcaccgtctcctcag

SEQ ID NO: 9899 - DNA, 385 bp, Homo sapiens
caggtgcagctgcaggagtcgggcccaggactggtgaagccttcggagaccctgtccctcacctgcactgtctctggtggctccatcagtagttactactggagctggatccggcagcccccagggaagggactggagtggattgggtatatctattacagtgggagcaccaactacaacccctccctcaagagtcgagtcaccatatcagtagacacgtccaagaaccagttctccctgaagctgagctctgtgaccgctgcggacacggccgtgtattactgtgcgagaaactccctcccccattactatggttcggggagttcctaccttgacaactggttcgacccctggggccagggaaccctggtcaccgtctcctcag

SEQ ID NO: 9900 - DNA, 388 bp, Homo sapiens
gaggtgcagctggtggagtctgggggaggcttggtccagcctggggggtccctgagactctcctgtgcagcctctggattcacctttaatagctattggatgagctgggtccgccaggctccagggaaggggctggagtgggtggccaacataaagcaagatggaagtgaaaaatactatgtggactctgtgaagggccgattcaccatctccagagacaacgccaagaactcagtgtatctgcaaatgagcagcctgagagccgaggacacggctgtgtattactgtgcgagagatttgggtgtactatggttcggggacttattagaaaacgagagaaaccggttcgacccctggggccagggaaccctggtcaccgtctcctcag

SEQ ID NO: 9901 - DNA, 388 bp, Homo sapiens
gaggtgcagctgttggagtctgggggaggcttggtacagcctggggggtccctgagactctcctgtgcagcctctggattcacctttagcagctatgccatgagctgggtccgccaggctccagggaaggggctgaagtgggtctcagctattagtggtagtggtggtagcacatacaacgcagactccgcgaagggccggttcaccacctccagagacaattccaagaacacgctgtatctgcaaatgaacagcctgagagccgaggacacggccctatattattgtgcgaccacgggaggcacatgggggattgtgactggatatgataccccccccgatgcttttgatatctggggccaagggacaatggtcaccgtctcttcag

SEQ ID NO: 9902 - DNA, 367 bp, Homo sapiens
gaagtgcagctggtggagtctgggggagtcgtggtacagcctggggggtccctgagactctcctgtgcagcctctggattcacctttgatgattataccatgcactgggtccgtcaagctccggggaagggtctggagtgggtctctcttattagttgggatggtggtagcacatactatgcagactctgtgaagggccgattcaccatctccagagacaacagcaaaaactccctgtatctgcaaatgaacagtctgagaactgaggacaccgccttgtattactgtgcaaaaggcgagcagtggctgaaacggtggggggcttttgatatctggggccaagggacaatggtcaccgtctcttcag

SEQ ID NO: 9903 - DNA, 388 bp, Homo sapiens
caggttcagctggtgcagtctggagctgaggtgaagaagcctggggcctcagtgaaggtctcctgcacggcttctggttacacctttaccagctacggtatcagctgggtgcgacaggcccctggacaagggcttgagtggatgggatggatcagcccttacaatagtaacacaaactatgcacagaagctccagggcagagtcaccatgaccacagacacatccacgggcacagcctacatggagctgaggagcctgagatctgacgacacggccgtgtattactgtgcgagagcccgagattactatgatagtagtggttattactatcaaaccctgtactactttgactactggggccagggaaccctggtcaccgtctcctcag

SEQ ID NO: 9904 - DNA, 388 bp, Homo sapiens
gaggtgcagctggtggagtctgggggaggcctggtcaagcctggggggtccctgagactctcctgtgcagcctctggattcaccttcagtagctatagcatgaactgggtccgccaggctccagggaaggggctggagtgggtctcatccattagtagtagtagtagttacatatactacgcagactcagtgaagggccgattcaccatctccagagacaacgccaagaactcactgtatctgcaaatgaacagcctgagagccgaggacacggctgtgtattactgtgcgagagatggggtgatgggaaactattgtagtggtggtagctgctaccgggagctggatgactactggggccagggaaccctggtcaccgtctcctcag

SEQ ID NO: 9905 - DNA, 387 bp, Homo sapiens
caggtgcagctggtgcagtctggggctgaggtgaagaagcccggggcctcagtgaaggtctcctgcaaggcttctggatacaccttcagcagttatgatatcaactgggtgcgacaggccactggacaagggcttgagtggatgggatggatgaaccctaacagtggtaacacaggctatgcacagaagttccagggcagagtcaccatgaccagggacacctccataaccacagcctacatggagctgagcagcctgagatctgaggacacggccgtgtattattgtgcgagagaacagtacatgggggttccgggcatagtagcagccggaacgcttggcggtatggacgtctggggccaagggaccacggtcaccgtctcctca

SEQ ID NO: 9906 - DNA, 355 bp, Homo sapiens
gaggtgcagctggtggagtctggaggaggcttgatccagcctggggggtccctgagactctcctgtgcagcctctgggttcaccgtcagtcgcaactacatgacctgggtccgccaggctccagggaaggggctggagtgggtctcacttatttatgccggtggtagcacatactacgcagactccgtgaagggccgattcaccatctccagagacaattccaagaacaccctgtatcttcaaatgaccagcctgagagccgacgacacggccgtatattactgtgcgagagatctccaggagcgcggaggtttggactactggggccagggaaccctggtcaccgtctcctcag

SEQ ID NO: 9907 - DNA, 355 bp, Homo sapiens
gaggtgcagctagtggagtctggaggaggcttgatccagcctggggggtccctgagactctcctgtgcagcctctgagttcatcgtcactagcaactacatgagctgggtccgccaggctccagggaaggggctggagtgggtctcacttatttatagcggtggtagcacatactacgcagactccgtgaagggccgattcaccatctccagagacaattccaagaacacactatatcttcaaatgaacagcctgagagccgaggacacggccgtgtattactgtgcgaggctgctccccttcggtgactactttgactactggggccagggaaccctggtcaccgtctcctcag

SEQ ID NO: 9908 - DNA, 384 bp, Homo sapiens
caggtgcagctgcaggagtcgggcccaggactggtgaagccttcggagaccctgtccctcacctgcactgtctctggtggctccatcagtagttactactggagctggatccggcagcccgccgggaagggactggagtggattgggcgtatctataccagtgggagcaccaactacaacccctccctcaagagtcgagtcaccatgtcagtagacacgtccaagaaccagttctccctgaagctgagctctgtgaccgccgcggacacggccgtgtattactgtgcgagagttctccagggatcttacgatattttgactggtagccactactactacggtatggacgtctggggccaagggaccacggtcaccgtctcctca

SEQ ID NO: 9909 - DNA, 387 bp, Homo sapiens
caggtgcagctggtggagtctgggggaggcttggtcaagcctggagggtccctgagactctcctgtgcagcctctggattcaccttcagtgactactacatgagctggatccgccaggctccagggaaggggctggagtgggtttcatacattagtagtagtggtagtaccatatactacgcagactctgtgaagggccgattcaccatctccagggacaacgccaagaactcactgtatctgcaaatgaacagcctgagagccgaggacacggccgtgtattactgtgcgagagatcgggggtattgtagtagtaccagctgctatttctactactactacggtatggacgtctggggccaagggaccacggtcaccgtctcctca

SEQ ID NO: 9910 - DNA, 387 bp, Homo sapiens
gacgagcagctggtggagtctgggggaggcttggtccagcctggggggtccctgagactctcctgtgcagcctctggattcacctttagtagctattggatgagctgggtccgccaggctccagggaaggggctggagtgggtggccaacataaggcaagatggaagtgagaaatactatgtggactctgtgaagggccgattcaccatctccagagacaacgccaagaactcactgtatctgcaaatgaacagcctgagagccgaggacacggccatgtattactgtgcgagacatcgagtctattatgattacatttgggggagttatcactactactacgttctggacgtctggggccaagggaccacggtcaccgtctcctca

SEQ ID NO: 9911 - DNA, 387 bp, Homo sapiens
gaggtgcagctggtggagtctgggggaggcttggtccagcctggggggtccctgagactctcctgtgcagcctctggattcacctttagtagctattggatgagctgggtccgccaggctccagggaaggggctggagtgggtggccaacataaagcaagatggaagtgagaaatactatgtggactctgtgaagggccgattcaccatctccagagacaacgccaagaagtcaatgtatctgcaaatgaacagcctgagagccgaggacacggccgtgtattactgtgcgagagagacggttacagtataccggacacccgggggttactactactcctacgctatggacgtctggggccaagggaccacggtcaccgtctcctca

SEQ ID NO: 9912 - DNA, 387 bp, Homo sapiens
gaggtgcagctggtggagtctgggggaggcttggtccagcctggggggtccctgagactctcctgtgcagcctctggattcacctttagtagctattggatgagctgggtccgccaggctccagggaaggggctggagtgggtggccaacataaggcaagatggaagtgaaacatactatgtggactctgtgaagggccgattcaccatctccagagacaacgccaagaactcactgtatctgcaaatgaacagcctgagagccgaggacacggctgtgtattactgtgcgagactggtacgatcttttgactggcgcccccccgagatttactactactacggtatggacgtctggggccaagggaccacggtcaccgtctcctca

SEQ ID NO: 9913 - DNA, 367 bp, Homo sapiens
caggtgcagctggtggagtctgggggaggcttggtcaagcctggagggtccctgagactctcctgtgcagcctctggattcaccttcagtgactactacatgagctggatccgccaggctccagggaaggggctggagtgggtttcatacattagtagtagtggtagtaccatatactacgcagactctgtgaagggccgattcaccatctccagggacaacgccaagaactcactgtatctgcaaatgaacagcctgagagccgaggacacggccgtgtattactgtgcgagagatagaacgaaattctatgatagtagtgcccttgactactggggccagggaaccctggtcaccgtctcctcag

SEQ ID NO: 9914 - DNA, 370 bp, Homo sapiens
caggtgcagctgcaggagtcgggcccaggactggtgaagccttcacagaccctgtccctcacctgcactgtctctggtggctccatcagcagtggtggttactactggagctggatccgccaacacccagggaagggcctggagtggattgggttcatctattacaatgggaacacccactacaacccgtccctcaagagtcgagttaccatatcagtagacacgtctaagaaccagttctccctgaagctgagctctgtgactgccgcggacacggccgtgtattactgtgcgagtgctacgtatagaagcagctactacggaacttttgatatctggggccaagggacaatggtcaccgtctcttcag

SEQ ID NO: 9915 - DNA, 390 bp, Homo sapiens
caggtgcagctgcaggagtcgggcccaggactggtgaagccttcacagaccctgtccctcacctgcgctgtctctggtggctccatcagcagtggtggttactcctggagctggatccggcagccaccagggaagggactggagtggattgggtatatctattacagtgggagcacctactacaacccgtccctcaagagtcgagttaccatatcagtagacacgtccaagaaccagttctccctgaagctgagctctgtgaccgccgcggacacggccgtgtattactgtgccagagggtgggaggggggttcggggagttattattccaactactactactacggtatggacgtctggggccaagggaccacggtcaccgtctcctca

SEQ ID NO: 9916 - DNA, 387 bp, Homo sapiens
gaggtgcagctgttggagtctgggggaggcttggtacagcctggggggtccctgagactctcctgtgcagcctctggattcacctttagcagctatgccatgagctgggtccgccaggctccagggaaggggctggagtgggtctcagctattagtggtagtggtggtagcacatactacgcagactccgtgaagggccggttcaccatctccagagacaattccaagaacacgctgtatctgcaaatgaacagcctgagagccgaggacacggctgtgtattactgtgcgagcttactcggcgagggtatagcagctcgtctaaagggctactactactacggtatggacgtctggggccaagggaccacggtcaccgtctcctca

SEQ ID NO: 9917 - DNA, 390 bp, Homo sapiens
cagctgcagctgcaggagtcgggcccaggactggtgaagccttcggagaccctgtccctcacctgcactgtctctggtggctccatcagcagtagtagttactactggggctggatccgccagcccccagggaaggggctggagtggattgggagtatctattatagtgggagcacctactacaacccgtccctcaagagtcgagtcaccatatccgtagacacgtccaagaaccagttctccctgaagctgagctctgtgaccgccgcagacacggctgtgtattactgtgcgaacctacttgattgtagtggtggtagctgctacacgacctactactactacggtatggacgtctggggccaagggaccacggtcaccgtctcctca

SEQ ID NO: 9918 - DNA, 387 bp, Homo sapiens
caggtgcaactggtgcagtctggggctgaggtgaagaagactggggcctcagtgaaggtttcctgcaagacatctggatacaccttcaccagttattatatgcactgggtgcgacaggcccctggacaaggacttgagtggatggggataatcaaccccagtggtggtagaacaacctacacacagaagatccagggcagagtcaccatgaccagggacacgtccacgagcacagtctacatggaactgagcagcctgagatctgaggacacggccgtatattattgtgcgagaggagactttggagtggttaacgtaggtctccgtcagttctactattatgctatggacgtctggggccaagggaccacggtcaccgtctcctca

SEQ ID NO: 9919 - DNA, 387 bp, Homo sapiens
caggtgcagctggtgcagtctggggctgaggtgaagaagcctgggtcctcggtgaaggtctcctgcaaggcttctggaggcaccttcagcagctatgctatcagctgggtgcgacaggcccctggacaagggcttgagtggatgggagggatcatccctatctttggtacagcaaactacgcacagaagttccagggcagagtcacgattaccgcggacgaatccacgagcacagcctacatggagctgagcagcctgagatctgaggacacggccgtgtattactgtgcgggggggggagatagcagctcgtccggagggagacattactactactactacggtatggacgtctggggccaagggaccacggtcaccgtctcctca

SEQ ID NO: 9920 - DNA, 387 bp, Homo sapiens
caggtgcagctggtgcagtctggggctgaggtgaagaagcctgggtcctcggtgaaggtctcctgcaaggcttctggaggcaccttcagcagctatgctatcagctgggtgcgacaggcccctggacaagggcttgagtggatgggagggatcatccctttctttggtacaacaaactacgcacagaagttccagggcagactcacgattgccgcggacgaatccacgagcacagcctacatggagctgagcagcctgagatctgaggacacggccgtgtattactgtgcgagagccggaccaaattactatgatagaagtggtaattatcggtacttctacgttatggacgtctggggccaagggaccacggtcaccgtctcctca

SEQ ID NO: 9921 - DNA, 387 bp, Homo sapiens
caggtgcagctggtgcagtctggggctgaggtgaagaagcctgggtcctcggtgaaggtctcctgcaaggcttctggaggcaccttcagcagctatgctatcagctgggtgcgacaggcccctggacaagggcttgagtggatgggagggatcatccctatctttggtacagcaaactacgcacagaagttccagggcagagtcacgattaccgcggacgaatccacgagcacagcctacatggagctgagcagcctgagatctgaggacacggccgtgtattactgtgcgagatgtaggaccctccttgatagtatagcagctcgccgtgtattctactacgatatggacgtctggggccaagggaccacggtcaccgtctcctca

SEQ ID NO: 9922 - DNA, 388 bp, Homo sapiens
gaggtgcagctggtgcagtccggagcagaggtgaaaaagcccggggagtctctgaggatctcctgtaagggttctggatacagctttaccagctactggatcagctgggtgcgccagatgcccgggaaaggcctggagtggatggggaagattgatcctgatgactcttataccaactacagcccgtccttccaaggccacgtcacgatctcagttgacaagtccatcagcactgcctacctgcagtggagcagcctgaaggcctcggacaccgccatgtattactgtgcgagacccggtggtgacacgtatcagtatgatagcagtggttatcacattgaatatttccagcactggggccagggcaccctggtcaccgtctcctcag

SEQ ID NO: 9923 - DNA, 388 bp, Homo sapiens
caggtgcagctggtgcagtctggggctgaggtgaagaagcctggggcctcaatgaaggtttcctgcaaggcatctggatacaccttcaccagctactatatgcactgggtgcgacaggcccctggacaagggcttgagtggatgggaataatcaaccctagtggtggtagcacaacctacgcacagaagttccagggcagagtcaccatgaccagggacacgtccacgagcacagtctacatggagctgagcaacctgagatctgaggacacggccgtgtattactgtgcgagaccgccccggggatactatgatagaactggttattacaccgcccccaaatacttccagcactggggccagggcaccctggtcaccgtctcctcag

SEQ ID NO: 9924 - DNA, 388 bp, Homo sapiens
caggtgcagctggtggagtctgggggaggcgtggtccagcctgggaggtccctgagactctcctgtgcagcctctggattcaccttcagtagctatgttattcactgggtccgccaggctccaggcaaggggctggagtgggtggcagttatatcatatgatggaagtaataaatactacgcagactccgtgaagggccgattcaccatctccagagacaattccaagaacacgctgtatctgcaaatgaacagcctgagagctgaggacacggctgtgtattactgtgcgagcccctattgtggtagtgactgctactacgcccccatccaggcctactggtacttcgatatctggggccgtggcactctggtcactgtctcctcag

SEQ ID NO: 9925 - DNA, 367 bp, Homo sapiens
gaggtgcagctggtggagtccgggggaggcttagttcagcctggggggtccctgagactctcctgtgcagcctctggattcaccttcagtagctactggatgcactgggtccgccaagctccagggaaggggctggtgtgggtctcacgtattaatagtgatgggagtagcacaagctacgcggactccgtgaagggccgattcaccatctccagagacaacgccaagaacacgctgtatctgcaaatgaacagtctgagagccgaggacacggctgtgtattactgtgcaagagattcggacagctatggttactacgtcttttttgactactggggccagggaaccctggtcaccgtctcctcag

SEQ ID NO: 9926 - DNA, 358 bp, Homo sapiens
caggtgcagctggtgcagtctggggctgaggtgaagaagcctggggcctcagtgaaggtctcctgcaaggcttctggatacaccttcaccggctactatatgcactgggtgcgacaggcccctggacaagggcttgagtggatgggatggatcaaccctaacagtggtggcacaaactatgcacagaagtttcagggcagggtcaccatgaccagggacacgtccatcagcacagcctacatggagctgagcaggctgagatctgacgacacggccgtgtattactgtgcgagagaggggttgatggttcgctggttcgacccctggggccagggaaccctggtcaccgtctcctcag

SEQ ID NO: 9927 - DNA, 374 bp, Homo sapiens
gaagtgcagctggtggagtctgggggaggcttggtacagcctggcaggtccctgagactctcctgtgcagcctctggattcacttttgatgattatgccatgcactgggtccggcaagttccagggaagggcctggagtgggtctcaggtattagttggaatagtggtaccataggctatgcggactctgtgaagggccgattcattatctccagagacaacggcaagaactccctgtatctgcaaatgaggagtctgagacctgaggacacggccttgtattactgtacaaaagatgccggtgggattagaatggttcgggaggaatactattttgactactggggccagggaaccctggtcaccgtctcctc

SEQ ID NO: 9928 - DNA, 375 bp, Homo sapiens
caggtgcagctggtggagtctgggggaggcgtggtccagcctgggaggtccctgaggctctcctgtgcagcctctggattcaccttcagtagctatggcatgcactgggtccgccaggctccaggcaaggggctggagtgggtggcagttatatcatatgatggaagtaataaatactatgcagactccgtgaagggccgattcaccatctccagagacaattccaagaacacgctgtatctgcaaatgaacagcctgagaactgaggacacggctgtgtattactgtgcgaaagatatgggtattgtagtagtaccagctgcagcctacggtatggacgtctggggccaagggaccacggtcaccgtctcctca

SEQ ID NO: 9929 - DNA, 375 bp, Homo sapiens
gaggagcagctggtgcagtctggagcagaggtgaaaaagcccggggagtctctgaagatctcctgtaagggttctggatacagcttttccagcatgtggatcgtctgggtgcgccagatgcccgggaaaggcctggagtggatggggatcatctatcctggtgactctgataccagatacagcccgtccttccaaggccaggtcaccatctcagccgacaagtccatcagcaccgcctacctgcagtggagcagcctgaaggccccggacaccgccatgtattactgtgcgagactttctgctatggttcggggagtcgcctactactacgctttggacgtctggggccaagggaccacggtcaccgtctcctca

SEQ ID NO: 9930 - DNA, 375 bp, Homo sapiens
caggtgcagctggtgcagtctggggctgaggtgaagaagactgggtcctcagtgaaggtttcctgcaagtctgccggatacaccttcacctaccgctacctgcactgggtgcgacaggcccccggacaagcgcttgagtggatgggatggatcacacctttcaatggtaacaccaaaaacgcacagaaattccaggacagagtcaccattaccagggacaggtctatgagcacagcctacatggagctgagcagcctgacatctgaggacacagccatgtattactgtgcagggcaaggttcggggaattattataacgtccgctacttcgctatggacgtctggggccaagggaccacggtcaccgtctcctca

SEQ ID NO: 9931 - DNA, 372 bp, Homo sapiens
caggtgcagctacagcagtggggcgcaggactgttgaagccttcggagaccctgtccctcacctgcgctgtctatggtgggtccttcagtggttactactggagctggatccgccagcccccagggaaggggctggagtggattggggaaatcaatcatagtggaagcaccaactacaacccgtccctcaagagtcgagtcaccatatcagtagacacgtccaagaaccagttctccctgaagctgagctctgtgaccgccgcggacacggctgtgtattactgtgcgagaggcagaacgcagcagctggtaccctactactactacggtatggacgtctggggccaagggaccacggtcaccgtctcctca

SEQ ID NO: 9932 - DNA, 378 bp, Homo sapiens
caggtgcagctgcaggagtcgggcccaggactggtgaagccttcacagaccctgtccctcacctgcactgtctctggtggctccatcagcagtggtggttactactggagctggatccgccagcacccagggaagggcctggagtggattgggtacatctattacagtgggagcacctactacaacccgtccctcaagagtcgagttaccatatcagtagacacgtctaagaaccagttctccctgaagctgagctctgtgactgccgcggacacggccgtgtattactgtgcgagaggggtgggagctactacctcctggtactactactacggtatggacgtctggggccaagggaccacggtcaccgtctcctca

SEQ ID NO: 9933 - DNA, 375 bp, Homo sapiens
caggtgcagctggtgcagtctggggctgaggtgaagaagcctggggcctcagtgaaggtctcctgcaaggcttctggatacctcttcactgactactatatatactgggtgcgacaggcccctggacaagggcttgagtggatgggatggatcaaccctaccagtggtggcacaaactatgcacagaagtttcagggcagggtcaccatgaccagggacacgtccatcagcacagcctacatggagctgagcagactgagatctgacgacacggccgtgtattactgtgcgcgagagcaggggggggtccacctgcgggactactactacggtatggacgtctggggccaaggggccacggtcaccgtctcctca

SEQ ID NO: 9934 - DNA, 375 bp, Homo sapiens
caggtgcagctggtgcagtctggggctgaggtgaagaagcctggggcctcagtgaaggtctcctgcaaggcctctggatacaccttcaccggctactacatgcactgggtgcgacaggcccctggacaagggcttgagtggatgggatggatcaaccctaacagtggtggcacaaactatgcacagaagtttcaggacagggtcaccatgaccagggacacgtccatcagcacagtctacatggagctgagcaggctgatatctgacgacacggccgtgtattactgtgcgagaagggccgttggcagcagctggacccgagcctactacggtttggacgtctggggccaagggacaacggtcaccgtctcctca

SEQ ID NO: 9935 - DNA, 370 bp, Homo sapiens
cagctgcagctgcaggagtcgggcccaggactggtgaagccttcggagaccctgtccctcacctgcactgtctctggtgactccatcagcagtagtagttactactggggctggatccgccagcccccagggaaggggctggagtggattgggaatatcttttatagtgggagcacttactacaacccgtccctcaagagtcgactcaccatatttgtagacacgtccaagaaccagttctccctgaagctgaactctgtgaccgccgcagacacggctgtgtattactgtgcgagaatggggtattactatgatagtagtgaagcttttgatatctggggccaagggacaattgtcaccgtctcttcag

SEQ ID NO: 9936 - DNA, 376 bp, Homo sapiens
caggtgcagctggtgcagtctggggctgaggtgaagaagcctggggcctcagtgaaggtttcctgcaaggcatctggatacaccttcaccaactactatatgcattgggtgcgacaggcccctggacaagggcttgagtggatgggaataatcaaccctagtggtggtactacaagctacgcacagaagttccagggcagagtcaccatgaccagggacacgtccacgagcacagtctacatggagctgagcagcctgagatctgaggacacggccgtgtattactgtgcgagagatcaattgggcgatttcgtggggggagataacagctggttcgacccctggggccagggaaccctggtcaccgtctcctcag

SEQ ID NO: 9937 - DNA, 382 bp, Homo sapiens
gaggtgcagctggtggagtccgggggaggcttggtccagcctggggggtccctgaaactctcctgtgcagcctctgggttcaccttcagtggctctgctatgcactgggtccgccaggcttccgggaaagggctggagtgggttggccgtattagaagcaaagctaacagttacgcgacagcatatgctgcgtcggtgaaaggcaggttcaccatctccagagatgattcaaagaacacggcgtatctgcaaatgaacagcctgaaaaccgaggacacggccgtgtattactgtactaggctaacctgggattacgatttttggagtggttggaactggttcgacccctggggccagggaaccctggtcaccgtctcctcag

SEQ ID NO: 9938 - DNA, 390 bp, Homo sapiens
caggtcaccttgaaggagtctggtcctgtgctggtgaaacccacagagaccctcacgctgacctgcaccgtctctgggttctcactcagcaatgctagaatgggtgtgagctggatccgtcagcccccagggaaggccctggagtggcttgcacacattttttcgaatgacgtaaaatcctacagtacatctctgaagagcaggctcaccatctccaaggacacctccaaaagccaggtggtccttaccatgaccaacatggaccctgtggacacagccacatattactgtgcacggatacaaggatattgtagtggtggtagctgctggtactactactactacggtatggacgtctggggcccagggaccacggtcaccgtctcctca

SEQ ID NO: 9939 - DNA, 376 bp, Homo sapiens
gaggtgcagctagtgcagtctggagcagaggtgaaaaagcccggggagtctctgaagatctcctgtaagggttctggatacagctttaccaactactggatcggctgggtgcgccagatgcccgggaaaggcctggagtggatggggatcatctatcctggtgactctgataccagatacagcccgtccttccaaggccaggtcaccatctcagccgacaagtccatcagcaccgcctacctgcagtggagcagcctgaaggcctcggacaccgccatgtattactgtgcgagacttcccactgagtattactatggttcggggacttattatctggactactggggccagggaaccctggtcaccgtctcctcag

SEQ ID NO: 9940 - DNA, 376 bp, Homo sapiens
gaggtgcagctggtacagtctggagcagagttaaaaaagcccggggagtctctgcagatctcctgtaagggttctggatacagctttaccaactattggatcggctgggtgcgccagatgcccgggaaaggcctggagtggatggggatcatctatcctggtgactctgataccagatacagcccgtccttccaaggccaggtcaccatctcagccgacaagtccatcagcaccgcctacctgcagtggagcagcctgaaggcctcggacaccgccatgtattactgtgcgagacgatctgccgagtatagcagtggctggtacatctggggattagactactggggccagggaaccctggtcaccgtctcctcag

SEQ ID NO: 9941 - DNA, 376 bp, Homo sapiens
gaagtgcagctggtgcagtccggagcagaggtgaaaaagcccggggagtctctgaggatctcctgtaagggttctggatacagctttaccagctactggatcagctgggtgcgccagatgcccgggaaaggcctggagtggatggggaggattgatcctagtgactcttataccaactacagcccgtccttccaaggccacgtcaccatctcagctgacaagtccatcagcactgcctacctgcagtggagcagcctgaaggcctcggacaccgccatgtattactgtgcgagacatacccacgatttttggagtggttattatggggcggaagttgactactggggccagggaaccctggtcaccgtctcctcag

SEQ ID NO: 9942 - DNA, 376 bp, Homo sapiens
caggtgcagctggtggagtctgggggaggcgtggtccagcctgggaggtccctgagactctcctgtgcagcgtctggattcaccttcagtagctatggcatgcactgggtccgccaggctccaggcaaggggctggagtgggtggcagttatatggtatgatggaagtaataaatactatgcagactccgtgaagggccgattcaccatctccagagacaattccaagaacacgctgtatctgcaaatgaacagcctgagagccgaggacacggctgtgtattactgtgcgaggggcagtccatttaccttgtatagcagtggctggtacccaggggggtactggggccagggaaccctggtcaccgtctcctcag

SEQ ID NO: 9943 - DNA, 373 bp, Homo sapiens
caggtgcacctgcgggagtcgggcccaggactggtgaagccttcggagaccctgtccctcacctgcactgtctctggtggctccatcagtagttactactggagctggatccggcagcccccagggaagggactggagtggattgggtatatctattacagtgggagcaccaactacaacccctccctcaagagtcgagtcaccatatcagtagacacgtccaagaaccagttctccctgaagctgagctctgtgaccgccgcagacacggctgtgtattactgtgcgagacacttctccgatagggtggtggtgactgccccgtactactttgactactggggccagggaaccctggtcaccgtctcctcag

SEQ ID NO: 9944 - DNA, 373 bp, Homo sapiens
caggtgcagctgcagcagtcgggcccaggactggtgaagccttcggagaccctgtccctcacctgcactgtctctggtggctccgtcagtagttactactggagctggatccggcagcccccagggaagggactggagtggattgggtatatctattacagtgggagcgccaactacaacccctccctcaagagtcgagtcaccatatcagtagacacgtccaagaaccagttctccctgaagctgagctctgtgaccgctgcggacacggccgtgtattactgtgcgagagataagtgggtgagggactacggtggtaacttctactactttgactactggggccagggaaccctggtcaccgtctcctcag

SEQ ID NO: 9945 - DNA, 373 bp, Homo sapiens
caggtgcagctgcaggagtcgggcccaggactggtgaagccctcggagaccctgtccctcacctgcactgtctctggtggctccatcggaacttaccactggaactggatgcggcagtccccagggaagggactggagtggattgggtatatccaggacagtgggagcaccaactacaacccctccctcaagagtcgagtcaccttatcagtagacacgcccaagaaccagttctccctgacgctgaggtctgtgaccgctgcggacacggccgtgtattactgtgcgagaggtggtttttggcgtggttatgaggacccttcgtggtggttcgacccctggggccagggaattctggtcaccgtctcctcag

SEQ ID NO: 9946 - DNA, 370 bp, Homo sapiens
cagctgcagctgcaggagtcgggcccaggactggtgaagccttcggagaccctgtccctcacctgcactgtctctggtggctccatcagcagtagtaattactactggggctggatccgccagcccccagggaaggggctggagtggattgggagtatcttttatagtgggatcacctacgacaacccgtccctcaagagtcgagtcaccatatccgtagacacgtccaagaaccagttttccctgaagctgagctctgtgaccgccgcagacacggctgtgtattattgtgcgagaatgggatattactatgatagaagtgatgcttttgatatctggggccaagggacaatggtcaccgtctcttcag

SEQ ID NO: 9947 - DNA, 376 bp, Homo sapiens
caggtgcagctgcaggagtcgggcccaggactggtgaagccttcggagaccctgtccctcacctgcactgtctctggttactccatcagcagtggttactactggggctggatccggcagcccccagggaaggggctggagtggattgggagtatctatcatagtgggagcacctactacaacccgtccctcaagagtcgagtcaccatatcagtagacacgtccaagaaccagttctccctgaagctgagctctgtgaccgccgcagacacggccgtgtattactgtgcgagagatcgaaggggagcagtggctgccatacggggggtctactttgactactggggccagggaaccctggtcaccgtctcctcag

SEQ ID NO: 9948 - DNA, 376 bp, Homo sapiens
caggtgcagctgcaggagtcgggcccaggactggtgaagccttcggagaccctgtccctcacctgcactgtctctggttactccatcagcagtggttactactggggctggatccggcagcccccagggaaggggctggagtggattgggagtatctatcatagtgggagcacctactacaacccgtccctcaagagtcgagtcaccatatcagtagacacgtccaagaaccagttctccctgaagctgagctctgtgaccgccgcagacacggccgtgtattactgtgcgagagtcgatagcagcagctggtccggtccttcctactactactttgactactggggccagggaaccctggtcaccgtctcctcag

SEQ ID NO: 9949 - DNA, 376 bp, Homo sapiens
caggttcagctggtgcagtctggagctgaggtgaagaagcctggggcctcagtgaaggtctcctgcaaggcttctggtttcacctttaccagccacggtatcagttgggtgcgacaggcccctggacaagggcttgagtggatggggtggatcagcacttacaatggggacacaaactatgcacagaaggtccagggcagagtcaccatgaccacagacacatccacgagtacagcctacatggagctgaggagcctgagatctgacgacacggccgtgtattactgtgcgagagtgcaatcggaatattgtactagtgccagctgctatttttttgattactggggccagggaaccctggtcaccgtctcctcag

SEQ ID NO: 9950 - DNA, 373 bp, Homo sapiens
caggtgcagctacagcagtggggcgcaggactgttgaagccttcggagaccctgtccctcacctgcgctgtctatggtgggtccttcagtggttactactggagctggatccgccagcccccagggaaggggctggagtggattggggaaatcaatcatagtggaagcaccaactacaacccgtccctcaagagtcgagtcaccatatcagtagacacgtccaagaaccagttctccctgaagctgagctctgtgaccgccgcagacacggctgtgtattactgtgcgagacgtattcctggtggcaattactatgatagtagtggtccctttgactactggggccagggaaccctggtcaccgtctcctcag

SEQ ID NO: 9951 - DNA, 376 bp, Homo sapiens
caggtgcagctggtgcagtctggggctgaggtgaagaagcctgggtcctcggtgaaggtctcctgcaaggcttctggaggcaccttcagcaattatgctaccagctgggtgcgacaggctcctggacaagggcttgagtacatgggagggatcatccctatgcttggcacagcaaactacgcgcagaagttccagggcagagtcacgattaccgcggacgaatccacgagcacagcctacatggaactgagcagcctgagatctgacgacacggccgtgtattattgtgcgagagattggagggaatgtagtagtatcaggtgttcttactggttcgacccctggggccagggaaccctggtcaccgtctcctcag

SEQ ID NO: 9952 - DNA, 376 bp, Homo sapiens
caggtgcagctggtgcagtctggggctgaggtgaagaagcctgggtcctcggtgaaggtctcctgcaaggcttctggaggcaccttcagcagctatgctatcagctgggtgcgacaggcccctggacaagggcttgagtggatgggagggatcatccctatctttggtacagcaaactacgcacagaagttccagggcagagtcacgattaccgcggacgaatccacgagcacagcctacatggagctgagcagcctgagatctgaggacacggccgtgtattactgtgcgagagattggagatattgtagtggtggtagctgctacaactggttcgacccctggggccagggaaccctggtcaccgtctcctcag

SEQ ID NO: 9953 - DNA, 371 bp, Homo sapiens
gcagttggtgcagtctggggctgaggtgaagaagcctgggtcctcggtgaaggtctcctgcaaggcttctggaggctctttcagcatctatgctatcaactgggtgcgacaggcccctggacaagggcttgagtggatgggagggatcatccctatctctggtagagcaaactacgcacagaagttccagggcagagtcaccattaccgcggacgaatccacgagcacagcctacatggagctgagcagcctgagatctgaggacacggccgtgtattattgtgcgagagagtggagacattgtagtggtggtagctgcttgttctggttcgacccctggggccagggaaccctggtcaccgtctcctcag

SEQ ID NO: 9954 - DNA, 375 bp, Homo sapiens
caggtgcagctggtgcagtctggggctgaggtgaagaagcctggggcctcagtgaaggtttcctgcaaggcatctggatacaccttcaccagctactatatgcactgggtgcgacaggcccctggacaagggcttgagtggatgggaataatcaaccctagtggtggtagcacaagctacgcacagaagttccagggcagagtcaccatgaccagggacacgtccacgagcacagtctacatggagctgagcagcctgagatctgaggacacggccgtgtattactgtgcgagagatcgtattacgatttttggagtggttaccctgcacggtatggacgtctggggccaagggaccacggtcaccgtctcctca

SEQ ID NO: 9955 - DNA, 376 bp, Homo sapiens
gaggtgcagctgttggagtctgggggaggcttggtagagcctggggggtccctgagactctcctgtgcagcctcaggattcacttttatcaactatgccatgagctgggtccgccaggctccagggaaggggctggagtgggtctcaagtgtgagtattagtggtggtagtacatactacgcagactccgtgaagggccggttcaccatctccagagacaattccaagaacacgctgtatctgcaaatgaacagcctgagagccgaggacacggccgtttattactgtgcgaaagatctgctaaagcgttactatgagggtagtgcttactattgggactactggggccagggggccctggtcaccgtctcctcag

SEQ ID NO: 9956 - DNA, 367 bp, Homo sapiens
gaagtgcagctggtgcagtccggagcagaggtgaaaaagcccggggagtctctgaggatctcctgtaagggttctggatacagctttaccagctactggatcacctgggtgcgccagatgcccgggaaaggcctggagtggatggggaggattgatcctggtgactcttataccaactacggcccgtccttccaaggccacgtcaccatctcagttgacaagtccatcagcactgcctacctgcagtggagcagcctgaaggcctcggacaccgccatgtattactgtgcgagacatcggacgtggatgcaccaaaatgatgcttttgatatctggggccaagggacagtggtcaccgtctcttcag

SEQ ID NO: 9957 - DNA, 376 bp, Homo sapiens
gaggtgcagttgttggagtctgggggaggcttggtacagcctggggggtccctgagactctcctgtgcagcctctggattcacctttagcaactatgccatgagctgggtccgccaggctccagggaaggggctggagtgggtctcagttattagtggtagtggtggcagcacatactacgcagactccgtgaagggccggttcaccgtctccagagacaattccaagaacacgctggatctgcaaatgaacagcctgagagccgaggacacggccatatattactgtgcgaaagagttgatgggatggctacaattacaggggacgagccccccgaccaaatggggccagggaaccctggtcaccgtctcctcag

SEQ ID NO: 9958 - DNA, 376 bp, Homo sapiens
caggagcagctggtggagtcggggggaggcttggtcgagcctggagggtccctgagactctcctgcgcagcctctggattcaccttcagtgactcctatatgagttggatccgccaggctccagggaaggggctggagtggcttgcatatattagtggtagtggtagtaccatatattacggagactctgtgaagggccgattcactatctccagggacaacgccttcaactcagtgtttctccaaatgaccagcctgacagccgatgacacggccgtgtattactgtgcgcgagatcgatggttcgagggatatcttgggcggggcacctggttcgacccctggggccagggaaccctggtcaccgtctcctcag

SEQ ID NO: 9959 - DNA, 376 bp, Homo sapiens
caggtgcaggtggtggagtctgggggaggcttggtcgagcctggagggtccctgagactctcctgcgcagcctctggattcagcttcagtgaatactatatgagttggcttcggcaggctccagggaaggggctggagtggctttcatacattagtgctgacggtactacggtttattacggagattctgtgaggggccgattcactgtctccagggacaacgccaagaattcactgattctgcaaatgactagcctgagagccgatgacaccgccctttattactgtgcgcgagatcggtggtttggaggattcgccgggcggggcacatggttcgacacctggggccagggaaccctggtcaccgtctcctcag

SEQ ID NO: 9960 - DNA, 376 bp, Homo sapiens
gaagtgcagctggtggagtctgggggagtcgtggtacagcctggggggtccctgagactctcctgtgcagcctctggattcacctttgatgattataccatgcactgggtccgtcaagctccggggaagggtctggagtgggtctctcttattagttgggatggtggtagcacatactatgcagactctgtgaagggccgattcaccatctccagagacaacagcaaaaactccctgtatctgcaaatgaacagtctgagaactgaggacaccgccttgtattactgtgcaaaagatcgcgatattttgactggttactataagggatatgcttttcatatctggggccaagggacaatggtcaccgtctcttcag

SEQ ID NO: 9961 - DNA, 376 bp, Homo sapiens
gaggtgcagctgttggagtctgggggaggcttggtacagcctggggggtccctgagactctcctgtgcagcctctggattcacctttagcagctatgccatgatctgggtccgccaggctccagggaaggggctggagtgggtctcagctattagtggtagtggtcatagtacatactacgcagactccgtgaagggccggttcaccctctccagagacaattccaagaacacgctgtatctgcaaatgaacagcctgagagccgaggacacggccgtatattactgtacgaaagttgactactactatgatagtagtgcttatgatgatgcttttgatatctggggccaagggacaatggtcaccgtctcttcag

SEQ ID NO: 9962 - DNA, 379 bp, Homo sapiens
cagctgcagctgcaggagtcgggcccaggactggtgaagccttcggagaccctgtccctcacctgcactgtctctggtggctccatccgcagtagtaattactactggggctggatccgccagcccccagggaaggaactggagtggattgggagtatctattatagtgggaccagctactacaacccgtccctcaagagtcgagtcaccatttccgtagacacgtccaagaaccagttctccctgaagctgagctctgtgaccgccgcagacacggctgtgtattactgtgcgagacgtattcctggtggcaattactatgatagtagtggtccctttgactactggggccagggaaccctggtcaccgtctcctcag

SEQ ID NO: 9963 - DNA, 379 bp, Homo sapiens
cagctgcagctgcaggagtcgggcccaggactggtgaagccttcggagaccctgtccctcacctgcactgtctctggtggctccatccgcagtagtaattactactggggctggatccgccagcccccagggaaggaactggagtggattgggagtatctattatagtgggaccaactactacaacccgtccctcaagagtcgagtcaccatttccgtagacacgtccaagaaccagttctccctgaagctgagctctgtgaccgccgcagacacggctgtgtattactgtgcgagacacttctccgatagggtggtggtgactgccccgtactactttgactactggggccagggaaccctggtcaccgtctcctcag

SEQ ID NO: 9964 - DNA, 379 bp, Homo sapiens
cagctgcagctgcaggagtcgggcccaggactggtgaagccttcggagaccctgtccctcacctgcactgtctctggtggctccatcaccagtagtagttactactggggctggatccgccagcccccagggaaggggctggagtggattgggaatatctattacagtgggagcacctactacaacccgtccctcaagagtcgagttaccatttccgtagacacgtccaagaaccagctctccgtgaagttgagctctgtgaccgccgcagacacggctgtgtattactgtgcgagacgggacgtggatacagctatgattacgacccaagggaactttgacgactggggccagggaaccctggtcaccgtctcctcag

SEQ ID NO: 9965 - DNA, 379 bp, Homo sapiens
cagctgcagctgcaggagtcgggcccaggactggtgaagccttcggagaccctgtccctcacctgcactgtctctggtggctccatcagcagtagtagttacttctggggctggatccgccagcccccagggaaggggctggagtggattgggagtatctattatagtgggagcacctactacaacccgtccctcaagagtcgagtcaccatatccgtagacacgtccaagaaccagttctccctgaagctgagctctgtgaccgccgcagacacggctgtgtattactgtgcgagacgtagcacccattactatggttcggggagttattattactttgactactggggccagggaaccctggtcaccgtctcctcag

SEQ ID NO: 9966 - DNA, 367 bp, Homo sapiens
caggtgcagctggtgcagtctggggctgaggtgaagaagcctggggcctcagtgaaggtctcctgcaaggcttctggatacaccttcaccggctactatatacactgggtgcgacaggcccctggacaagggcttgagtggatgggatggatcaaccctaacagtggtgccacaaactatgcacagaagtttcagggcagggtcaccatgaccagggacacgtccgtcaccacagttgacatggagctgagcagactgagatctgacgacacggccgtgtattactgtgcgagagatttcgggttttcccatctagtagggtccttcgatctctggggccgtggcaccctggtcactgtctcctcag

SEQ ID NO: 9967 - DNA, 379 bp, Homo sapiens
cagctgcagctgcaggagtcgggcccaggactggtgaagccttcggagaccctgtccctcacctgcactgtctctggtggctccatcagcagtagtagttactactggggctggatccgccagcccccagggaaggggctggagtggattgggagtatctattatagtgggagcacctactacaacccgtccctcaagagtcgagtcaccatatccgtagacacgtccaagaaccagttctccctgaagctgagctctgtgaccgccgcagacacggctgtgtattactgtgcgagacattatggtatatccatccattttgactggttaccccactttgactactggggccagggaaccctggtcaccgtctcctcag

SEQ ID NO: 9968 - DNA, 379 bp, Homo sapiens
caggtgcagctgcaggagtcgggcccaggactggtgaagccttcacagaccctgtccctcacctgcactgtctctggtggctccatcagcagtggtggttactactggagctggatccgccagcacccagggaagggcctggagtggattgggtacatctattacagtgggagcacctactacaacccgtccctcaagagtcgagttaccatatcagtagacacgtctaagaaccagttctccctgaagctgagctctgtgactgccgcggacacggccgtgtattactgtgcgagagtcccgacacaaccgatcgattactatgatagtagtgcttttgatatctggggccaagggacaatggtcaccgtctcttcag

SEQ ID NO: 9969 - DNA, 376 bp, Homo sapiens
caggtgcagttggtgcagtctggggctgacattaagaagcctggggcctcagtgaaagtctcctgtaaggcttctggatacaccttcaccggccactatctgcactgggtgcgccaggctcccggacaaggacttgagtggatgggatggatcaaccccaagagtggtgccacaaattacccacagaagtttcaggagagggtcaccatgaccagggacacgtccatcagaacagcctacatagacttgagcaggctgacctctgacgacacggccatatatttctgtgcgagagattccgtcgttagtagtggttatgcaaacgtcgattcttttgatttgtggggccaagggacaaaggtcaccgtctcttcag

SEQ ID NO: 9970 - DNA, 375 bp, Homo sapiens
caggtgcagctggtggagtctgggggaggcgtggtccagcctgggaggtccctgagactctcctgtgcagcgtctggattcacctacaggaattttggcatgcactgggtccgccagactccaggcaaggggctggagtgggtggcagttatatggtatgatggaagtactaaatactatgcagactccgtgaagggccgattcacaatctccagagacacttccaagaacacactgtatctgcaaatgaacagcctgagagtcgaggacacggctgtgtattactgtgcgagagacccccccatagtgggagccactacggtcggtgatgcatttgatatctggggccaagggacaatggtcatcgtctcttca

SEQ ID NO: 9971 - DNA, 376 bp, Homo sapiens
caggtgcagttggtggagtctgggggaggcgtggtccagcctgggaggtccctgagactctcctgtgcagcctctggattcaccttcagtagttatggcatgcagtgggtccgccaggctccaggcaagggactggagtgggtggcagttatatcatatgatggaagtaatacatactatgcagagtccgtgaagggccgattcaccatctccagagacaattccaagaacacgctgtatctgcaaatgaacagcctgagagccgaggacacggccgtgtattactgtgcgaggtcgtattactatgatagtagtggttattactacgatgcttttgatatctggggccaagggacaatggtcaccgtctcttcag

SEQ ID NO: 9972 - DNA, 376 bp, Homo sapiens
caggtgcagctggtgcagtctggggctgaggtgaagaagcctgggtcctcggtgaaggtctcctgcaaggcttctggaggccccttcagcagctattctatcagctgggtgcgacaggcccctggacaagggcttgagtggatgggaaggatcctccctatctttgggacatcaagctacccacagaagttccagggcagactcacgattaccgcggacgaatccacgagcacagcctacatggagctgagcagcctgagatctgaggacacggccgtctattactgtgcgagagataagggttactatgatagtagtggttccaattggtacttcgatctctggggccgtggcaccctggtcactgtctcctcag

SEQ ID NO: 9973 - DNA, 373 bp, Homo sapiens
gaggtgcagctggtggattctggaggaggcttgatccagcctggggggtccctgagactctcctgtgcagcctctgggttcaccgtcagtagcaactacatgagctgggtccgccaggctccagggaaggggctggagtgggtctcaatcatttatagcggtggtagcacatactacgcagactccgtgaagggccgattcaccatctccagagacaattccaagaacacgctgtatcttcaaatgaacagcctgagagccgaggacacggccgtgtattactgtgcgagaaaccaaaggggaacgtattactatgacgagactggtgcttttgatatctggggccaagggacaatggtcaccgtctcttcag

SEQ ID NO: 9974 - DNA, 376 bp, Homo sapiens
caggttcagctggtgcagtctggagctgaggtgaagaagcctggggcctcagtgaaggtctcctgcaaggcttctggttacacctttaccagctacggtatcagctgggtgcgacaggcccctggacaagggcttgagtggatgggatggatcagcgcttacaatggtaacacaaactatgcacagaagctccagggcagagtcaccatgaccacagacacatccacgagcacagcctacatggagctgaggagcctgagatctgacgacacggccgtgtattactgtgcgagagaagttgccgattactatggttcgggatcccactggtacttcgatctctggggccgtggcaccctggtcactgtctcctcag

SEQ ID NO: 9975 - DNA, 376 bp, Homo sapiens
caggtgcggctggttgagggcgggggaggcgtggtccagtctgggaggtccctgagactctcctgtgaagcctctggattcagtttcaacacctatggcatgcactgggtccgccaggctccaggcaaggggctggagtgggtggcattcatatcatacgatggaagtaataaatattacgcagactccgtgaagggccgattcaccatctccagagacaactccaagtacacactatatttgcagatgaatagcctgagagctgaggacacggctttgtacttctgtgcgaaagatccatattactatgagagtagtagttttcaatactattttgactactggggccagggaaccctggtcagcgtctcctcag

SEQ ID NO: 9976 - DNA, 364 bp, Homo sapiens
gaagtgcagctggtggagtctgggggaggcttggtgcagcctggcaggtccctgagactctcctgtgcagcctctggattcacctttgatgatcatgccatgcactgggtccggcaagctccagggaagggcctggagtgggtctcaggtattagttggaacggtggtaacatagactttgcggactctgtgaagggccgattcaccatctccagagacaacgccaggaactccctgtatctgcaaatgaacagtctgagagctgaggacacggccttgtattactgtgcaaaaggtcggctcggggagttattagatgcttttgatatctggggccaagggacaatggtcaccgtctcttcag

SEQ ID NO: 9977 - DNA, 370 bp, Homo sapiens
cagatcaccttgaaggagtctggtcctacgctggtgaaacccacacagaccctcacgctgacctgcaccttctctgggttctcactcagcactagtggagagggtgtgggctggatccgtcagcccccaggaaaggccctggagtggcttgcactcatttattggaatgatgataagcactacagcccttctctgaagagcaggctcaccatcaccaaggacacctccaaaaatcaggtggtccttacaatgaccaacatggaccctgtggacacagccacatattactgtgcacactcgtattactatgatagtagtggttatgactttgactactggggccagggaaccctggtcaccgtctcctcag

SEQ ID NO: 9978 - DNA, 373 bp, Homo sapiens
gaggtgcagctggtggagtctgggggaggcttggtacagcctggggggtccctgagactctcctgtgcagcctctggattcaccttcagtagctacgacatgcactgggtccgccaagctacaggaaaaggtctggagtgggtctcaggtattggtactgctggtgacacatactatccaggctccgtgaagggccgattcaccatctccagagaaaatgccaagaactccttgtatcttcaaatgaacagcctgagagccggggacacggctgtgtattactgtgcaagagtcaactatgatagtagtggttatcaccattactggtacttcgatctctggggccgtggcaccctggtcactgtctcctcag

SEQ ID NO: 9979 - DNA, 379 bp, Homo sapiens
caggtgcagctgcaggagtcgggcccaggactggtgaagccttcacagaccctgtccctcacctgcactgtctctggtggctccatcaacagtggtggttacttctggagctgggtccgccagcacccagggatgggcctggagtggattggatacatctattacagtggaagcacctactacaacccgtccctcaagagtcgagtttccatttcagtagacacgtctaagaaccagttctccctgaagctgagctctgtgaccgccgcggacacggctgtgtattactgtgcgagaggccgtgatagtagtggttattactactacactgaatacttccagcactggggccagggcaccctggtcaccgtctcctcag

SEQ ID NO: 9980 - DNA, 364 bp, Homo sapiens
caggtgcagctggtggagtctgggggaggcgtggtccagcctgggaggtccctgagactctcctgtgcagcctctggattcaggttcagtagttatggcatgcactgggtccgccaggctccaggcaaggggctggagtgggtgacacttatatcatatgatggaagtaataaatactatgcagactccgtgaagggccgattcaccatctccagagacaattccaagaacacgctgtatctgcaaatgaacagcctgcgagctgaggacacggctgtatattattgtgcgacagaccccattgtgttcggccttgatgtttttgatatctggggccaagggacaatggtcaccgtctcttcag

SEQ ID NO: 9981 - DNA, 364 bp, Homo sapiens
caggtgcagctggtggagtctgggggaggcgtggtccagcctggggggtccctgagactctcctgtacagcgtctggattcaccttcagtaactatggcatgcactgggtccgccaggctccaggcaaggggctggagtgggtggcatttatacggtttgatggaagtaataaatcctatgcaaactccgtgaagggccgattcaccatctccagagacaattccaagaacacgctgtatctgcaaatgaacagcctgagagctgaggacacggctgtctattactgtgcgaaagtggaacaactatggggatctgatgctcttgatatctggggccaagggacaatggtcaccgtctcttcag

SEQ ID NO: 9982 - DNA, 364 bp, Homo sapiens
caggtgcagctggtggagtcggggggaggcgtagtccagcctgggaggtccctgacactctcctgtgcagcctctggattcaccttcagtagctatggcatgcactgggtccgccaggctccaggcaaggggctggagtgggtggcagttatatcatatgatggaagtaataggtactatgcaggctccgtgaagggccgattcatcatctccagagacaactccaagaacacacagtttttgcaaatgaacagcctgagagctgaagacacggctgtgtattactgtgcgaagacctatagtgggagctattacgaagcttttgatctctggggccaagggacaatggtcaccgtctcttcag

SEQ ID NO: 9983 - DNA, 364 bp, Homo sapiens
caggtgcagttggtggagtctgggggaggcgtggtccagcctgggaggtccctgagactctcctgtgcagcctctggattcaccttcagtagctatgctatgcactgggtccgccaggctccaggcaaggggctggagtgggtggcagttatctcatatgatggaaataataaatactacgcagactccgtgaagggccgattcaccatctccagagacaattccaagaacacgctgtatctgcaaatgaacagcctgagagctgaggacacggctgtgtattactgtgcgagacctttaggagggaactacttcagtgcttttgatatctggggccaagggacaatggtcaccgtctcttcag

SEQ ID NO: 9984 - DNA, 364 bp, Homo sapiens
caggtgcagctggtggagtctgggggaggcgtggtccagcctgggaggtccctgagactctcctgtgcagcctctggattcaccttcagtagctatgctctgcactgggtccgccaggctccaggcaaggggctggagtgggtggcacttatatcatatgatggaactaataaatactacgcagactccgtgaagggccgattcaccgtctccagagacaattccaagaacacgctgtatctgcaaatgaacagcctgagagctgaggacacggctgtgtattattgtgcgagaccctatagtgggagctactttgaagcttttgatatctggggccaagggacaatggtcaccgtctcttcag

SEQ ID NO: 9985 - DNA, 364 bp, Homo sapiens
caggtgcagctggtggagtctgggggaggcgtggtccagcctgggaggtccctgagactctcctgtgcagcctctggattcaccttcagcagctatggcatgcactgggtccgccaggctccaggcaaggggctggagtgggtgacagttatatcatatgatggaagtaatgaatactatgcagactccgtgaagggccgattcaccatctccagggacaattccaagaacacgctgtatctgcaaatgaacagcctgagagctgaggacacggctgtgtattactgtgcgaaaccgtatagtgggaggtaccaagatacttatgatatctggggccaagggacaatggtcaccgtctcttcag

SEQ ID NO: 9986 - DNA, 363 bp, Homo sapiens
caggtgcagctggtgcagtctggggctgaggtgaagaagcctggggcctcagtgaaggtctcctgcaaggcttctggatacaccttcaccggctactatatgcactgggtgcgacaggcccctggacaagggcttgagtggatgggatggatcaaccctaacagtggtggcacaaactatgcacagaagtttcagggcagggtcaccatgaccagggacacgtccatcagcacagcctacatggagctgagcaggctgagatctgacgacacggccgtgtattactgtgcgagagaaacagctatggcccactactacggtatggacgtctggggccaagggaccacggtcaccgtctcctca

SEQ ID NO: 9987 - DNA, 360 bp, Homo sapiens
caggtgcagctgcaggagtcgggcccaggactggtgaagccttcggagaccctgtccctcacctgcactgtctctggtgactccatcagtagtttctactggagctggatccggcagcccccagggaagggactgcagtggattggatatatctactacagtgggagcaccaactacaacccctccctcaagagtcgagtcaccatatcatgggacacgtccaagaaccagttctccctgaagctgagctctgtgaccgctgcggacacggccgtctattactgtgcgagatccggggtttatggttccaactacgatatggacgtctggggccaagggaccagggtcaccgtctcctca

SEQ ID NO: 9988 - DNA, 367 bp, Homo sapiens
caggtgcacctggtgcagtctggggctgaggtgaagaagcctggggcctcagtgaaggtttcctgcaaggcatctggatacaccttcaccaactactatatgcactgggtgcgacaggcccctggacaagggcttgagtggatgggaataatcaaccctagtggtgggagcacaagctacgcacagaagttccagggcagagtcaccatgaccggggacacgtccacgagcacagtctacatggagctgagcagcctgagatctgaggacacggccgtttattcctgtgcgagaggggggattgtaccagctgcctctgatgcttttgatatctggggccaagggacaatggtcaccgtctcttcag

SEQ ID NO: 9989 - DNA, 366 bp, Homo sapiens
cagatcaccttgaaggagtctggtcctacgctggtgaaacccacacagaccctcacgctgacgtgcacgttctctgggttctcactcagcactagtggagtgggtgtgggctggatccgtcagcccccaggaaaggccctggagtggcttgcactcatttattgggatgatgataagcgctacagcccatctctgaagagcaggctcaccatcaccaaggacacctccaaaaaccaggtggtccttacaatgaccaacatggaccctgtggacacagccacatattactgtgcacacgcagctgccgtgatccactactacggtatggacgtctggggccaagggaccacggtcaccgtctcctca

SEQ ID NO: 9990 - DNA, 361 bp, Homo sapiens
caggtgcagctgcaggagtcgggcccaggactggtgaagccttcggagaccctgtccctcacctgcactgtctctggtggctccatcagtagttactactggagctggatccggcagcccccagggaagggactggagtggattgcgtatatctattacagtggaaacaccaactacaacccctccctcaagagtcgagtcaccatatcagtagacacgtccaagaaccagttctccctgaagctgagctctgtgaccgctgcggacacggccgtgtattactgtgcgagaggtgtagtaccagctgctaagggctggttcgacccctggggccagggaaccctggtcaccgtctcctcag

SEQ ID NO: 9991 - DNA, 364 bp, Homo sapiens
gaggtgcagctggtggagtctgggggaggcttggtccagcctggggggtccctgagactctcctgtgcagcctctggattcacctttagtacctattggatgagctgggtccgccaggctccagggaaggggctggagtgggtggccaacataaagcaagatggaagtgagaaatactatgtggactctgtgaagggccgattcaccatctccagagacaattccaagaacacgctgtatttggaagtgagcagcctgagaactgaggacacggctgtgtattactgtgcaagaactaacaatgggaactacaacggctactttgactactggggccagggaaccctggtcaccgtctcctcag

SEQ ID NO: 9992 - DNA, 376 bp, Homo sapiens
gaggtgcagctggtggagtctgggggaggcttggtccagcctggggggtccctgagactctcctgtgcagcctctggattcacctttagtagctattggatgagctgggtccgccaggctccagggaaggggctggagtgggtggccaacataaagcaagatggaagtgagaaatactatgtggactctgtgaagggccgattcaccatctccagagacaacgccaagaactcactgtatctgcaaatgaacagcctgagagccgaggacacggccgtgtattactgtgcgaggtcgtattactatgatagtagtggttattactacgatgcttttgatatctggggccaagggacaatggtcaccgtctcttcag

SEQ ID NO: 9993 - DNA, 363 bp, Homo sapiens
caggtgcagctggtgcagtctggggctgaggtgaagaagcctgggtcctcggtgaaggtctcctgcaaggcttctggaggcaccttcagcagctatgctatcagctgggtgcgacaggcccctggacaagggcttgagtggatgggagggatcatccctatctctggtccagcaaactacgcacagaagttccagggcagagtcacaattaccgcggacgaatccacgagcacagcctacatggagctgagcagcctgagatctgaggacacggccgtgtattattgtgcgagagaggatacagctatggcttactacggtatggacgtctggggccaagggaccacggtcaccgtctcctca

SEQ ID NO: 9994 - DNA, 363 bp, Homo sapiens
caggtgcagctggtgcagtctggggctgaggtgaagaagcctgggtcctcggtgaaggtctcctgcaaggcctctggaggcaccttcagcagccacgctatcagctgggtgcgacaggcccctggacaagggcttgagtggatgggagggatcatccctgtctttggtacaacaaactacgcacagaagttccagggcagagtcacgattaccgcggacgactccacgagcacagcctacatggagttgagcagcctgagatctgaggacacggccgtatattactgtgcgagggatgtagagatggctacaatttacggcatggacgtctggggccaagggaccacggtcaccgtctcctca

SEQ ID NO: 9995 - DNA, 364 bp, Homo sapiens
caggtgcagctggtgcagtctggggctgaggtgaagaggcctgggtcctcggtgaaggtctcctgcaaggcttctggaggcaccttcagcagctattctatcagttgggtgcgacaggcccctggacaaggccttgagtggatgggagggatcatccctatctttggtacaacaaactacgcacagaagttccagggcagagtcacgattaccgcggacgagtccacgagcacagcctacatggagctgagcagcctgagatctgacgacacggccgtatattactgtgggagaggacttagtggctggtatctcagctggttcgacccctggggccagggaaccctggtcaccgtctcctcag

SEQ ID NO: 9996 - DNA, 364 bp, Homo sapiens
caggtgcagctggtgcagtctggggctgaggcgaagaagcctgggtcctcggtgaaggtctcctgcaaggcttctgaaggcaccttcagcagccatgctatcaactgggtgcgacaggcccctggacaagggcttgagtggatgggagggatcatccctatctttggtacaacacattacgcacagaagttccagggcagagtcacgattaccgcggacgaatccacgagcacagcctacatggagctgagcagcctgagatctgaggacacggccgtatattactgtgcgaccccctatgatagtagtgggtacaattggttcgacccctggggccagggaaccctggtcaccgtctcctcag

SEQ ID NO: 9997 - DNA, 364 bp, Homo sapiens
caggtgcagctggtgcagtctggggctgaggtgaagaagcctgggtcctcggtgaaggtctcctgcaaggcttctggaggcaccttcagcaactatgctatcaactgggtgcgacaggcccctggacaagggcctgagtggatgggaggtatcatccctatcttcggaacaacacattacccacagaacttccagggcagagtcacgattaccgcggacgagtccacgagcacagcctacatggagctgaacagcctgagatctgaggacacggccatgtattactgtgcgaacgcggtgggggagttaacgtttcactggttcgacccctggggccagggaaccctggtcaccgtctcctcag

SEQ ID NO: 9998 - DNA, 367 bp, Homo sapiens
caggtgcagctggtgcagtctggggctgaggtgaagaagcctggggcctcagtgaaggtttcctgcaaggcatctggaaacaccttcagcagcaactatatacactgggtgcgacaggcccctggacaagggcttgaatggatgggaataatcaaccctagtggtggtagcacaagctacgcacagaagttccagggcagagtcaccatgaccagggacacgtccacgagcacagtctacatggcgttgagcagcctgagatctgaggacacggccgtctattactgtgcgagaggggggctagtaccagacgcctctgaggcttttgatatctggggccaagggacaatggtcaccgtctcttcag

SEQ ID NO: 9999 - DNA, 361 bp, Homo sapiens
gaggcgtacctggtgcagtctggaggaggcttgatccagccgggggggtccctgagactctcctgtgcagcctctgggctcaccgtcagtagcaactacatgacttgggtccgccaggctccagggaaggggctggagtgggtctcagttctttatgccggtggtagcacattctacgcagactccgtgaagggccgattcaccatctccagagacaattccaagaacacgctttatcttcaaatgaacagcctgagagccgaggacacggccgtgtattactgtgcgagagatttgggtggctacaatttcctgtcctttgactactggggccagggaaccctggtcaccgtctcctcag

SEQ ID NO: 10000 - DNA, 361 bp, Homo sapiens
gaggtgcagctggtggagtctggaggaggcttgatccagcctggggggtccctgagactctcctgtgcagtctctgggttcaccgtcagtagcaactacatgagctgggtccgccaggctccagggaaggggctggagtgggtctcagttatttatagcggtggtagtacatactacgcggactccgtgaagggccgattcaccatctccagagacaattccaagaacacgctgtatcttcaaatgaacagcctgagagccgcggacacggccgtgtattactgtgcgagaagccaatattgtattggtgactgccggtctggtgtctggggccagggaaccctggtcaccgtctcctcag

SEQ ID NO: 10001 - DNA, 364 bp, Homo sapiens
caggtgcagctggtggagtctgggggaggcgtggtccagcctgggaggtccctgagactctcctgtgcagcgtctggattcaccttcagtacctatggcatgcactgggtccgccaggctccaggcaaggggctggagtgggtggcacttatatggtatgatggaagtaacaaaaactatgtagactccgtgaagggccgattcaccatctccagagacaattccaagaatacggtgtatctgcaaatgaacagcctgagagccgaggacacggctgtatattactgtgcgagagaagccctgtggggcgatcagggtggatttgactcctggggccagggaaccctggtcaccgtctcctcag

SEQ ID NO: 10002 - DNA, 364 bp, Homo sapiens
gaagtgcagctggtggagtctgggggaggcttggtacagcctggcaggtccctgagactctcctgtgcagcctctcgattcacctttgacaattatgccatgcactgggtccggcaagctccagggaagggcctggagtgggtctcaggtattagttggaatagtggtagcataggctatgcggactctgtgaagggccgattcaccatctccagagacaattccaagaacacgctgtatttggaagtgagcagcctgagaactgaggacacggctgtgtattactgtgcaagaactaacaatgggaactacaacggctactttgactactggggccagggaaccctggtcaccgtctcctcag

SEQ ID NO: 10003 - DNA, 364 bp, Homo sapiens
gaagtgcagctggtggagtctgggggaggcttggtacagcctggcaggtccctgagactctcctgtgcagcctctggattcacctttgatgattatgccatgaactgggtccggcaagctccagggaagggcctggagtgggtctcaggtattagttggaatagtgatagcataggctatgcggactctgtgaagggccgattcaccatctccagagacaacgccaagaactccctgtatctgcaaatgaacagtctgagagctgaggacacggccttgtattattgtgcaaaaggggggagtagtggttatgccgaccgaattgactactggggccagggaaccctggtcaccgtctcctcag

SEQ ID NO: 10004 - DNA, 364 bp, Homo sapiens
caggtgcagctggtgcagtctggggctgaggtgaagaagcctggggcctcagtgaaggtctcctgcaaggcttctggatacaccttcatcggccactatatgcactgggtgcgacaggcccctggacaagggcttgagtggatgggatggatcaaccctaacagtggtggcacaaactatgcacataagtttcagggcagggtcaccatgaccagggacacgtccattagtacagcctacatggacctgagcaggctgacatctgacgacacggccgtgtattactgtgcgagagaaggagcagcagtggccgggggggactttgactactggggccagggaaccctggtcaccgtctcctcag

SEQ ID NO: 10005 - DNA, 364 bp, Homo sapiens
gaggtgcagctggtgcagtctggagcagaggtgaaaaagcccggggagtctctgaagatctcctgtaagggttctggatatagttttatcagctcctggatcggctgggtgcgccagatgcccgggaaaggcctggagtggatggggatcatctatcctggtgactctgataccagatacagcccgtccttccaaggccaggtcagcatttcagccgacaagtccatcaccaccgcctacgtgcagtggagcagcctgaaggcctcggacagtgccatatattactgtgcgacgctagatagcagcagctggactggggattttgactactggggccagggaacccaggtcaccgtctccccag

SEQ ID NO: 10006 - DNA, 367 bp, Homo sapiens
caggtgcagctggtgcagtctggggctgaggtgaagaagcctggggcctcagtgaaggtttcgtgcaaggcttctggatacaccttcaccaactactatatccactgggtgcgacaggcccctggacaagggcttgagtggatgggaataatcaatcctgatggtggaagcacagcctacgcacagaacttccagggcagagtcagcatgaccaggggtacgtcaacgagcacagtttacatggagctgagcagcctgagatctgaggacacggccatctactactgtgcgagagatctggtagtagtaccagcccgcaatgcttttgatatctggggccaagggacaatggtcaccgtctcctcag

SEQ ID NO: 10007 - DNA, 364 bp, Homo sapiens
gaggtgcagctggtgcagtctggagcagaggtgaaaaagcccggggagtctctgaagatctcctgtaagggttctggatacagctttaccaattactggatcggctgggtgcgccagatgcccgggaaaggcctggagtggatggggatcatctatcctggtgactctgagaccagatacagcccggccttccaaggccaggtcaccatctcagccgacaagtccttcaacaccgcctacctgcagtggagcagtctgaaggcctcggacaccgccatgtattactgtgtgagaccactgtataattggaacgacggggctgccgactactggggccagggaaccctggtcaccgtctcctcag

SEQ ID NO: 10008 - DNA, 364 bp, Homo sapiens
gaggtgcagctggtgcagtctggagcagaggtgaaaaagcccggggagtctctgacgatctcctgtaagggttccggatacaactttaccagctactggatcggctgggtgcgccagatgcccgggaaaggcctggagtggatggggatcatctatcctgatgactctgacaccagatacagcccgtccttccaaggccaggtcaccatctctgccgacaagtccatcagcaccgcctacctgcagtggagcagcctgaaggcctcggacaccgccatttattactgtgcgaggagtagtggctggccgaacggctactggttcgacccctggggccagggaaccctggtcaccgtctcctcag

SEQ ID NO: 10009 - DNA, 367 bp, Homo sapiens
caggtgcagctgcaggagtcgggcccaggactggtgaagccttcacagaccctgtccctcacctgcactgtctctggtggctccatcagcagtggtggttactactggagctggatccgccagcacccagggaagggcctggagtggattgggtacatctattacagtgggaggacctactacaatccgtccctcaagagtcgagttatcatatcagtagacacgtctaagaaccagttctccctgaagctgagctctgtgactgccgcggacacggccgtgtattactgtgcgagtatcggccctacggtggtaaccaatgcttttgatatctggggccaagggacaatgatcaccgtctcttcag

SEQ ID NO: 10010 - DNA, 367 bp, Homo sapiens
caggtgcagttgcaggagtcgggcccaggactggtgaagccttcacagaccctgtccctcacctgcgctgtctctggtggctccatcagcaggggtggtttctcctggagctggatccggcagccaccagggaagggactggagtggattgggtatatctattacagtgggagcacctaccacaacccgtccctcaagagtcgagttaccatatcactcgacacatccaagaaccagttctccctgacgctgagctctgtgaccgccgcggacacggccgtgtattactgtgccagagtcataacatcagctgctccaccctggttcgacccctggggccagggaaccctggtcaccgtctcctcag

SEQ ID NO: 10011 - DNA, 367 bp, Homo sapiens
caggtgcagctgcaggagtcgggcccaggactggtgaagccttcacagaccctgtccctcacctgcgctgtctctggtggctccatcagcagtggtggttactcctggagctggatccggcagccaccagggaagggactggagtggattgggtatatctattacagtgggagcacctactacaacccgtccctcaagagtcgagttaccatatcagtagacacgtccaagaaccagttctccctgaagctgagctctgtgaccgccgcggacacggccgtgtattactgtgccagaggcggagtctataactggaacgacgcctttgactactggggccagggaaccctggtcaccgtctcctcag

SEQ ID NO: 10012 - DNA, 367 bp, Homo sapiens
cagctgcagctgcaggagtccggctcaggactggtgaagccttcacagaccctgtccctcacctgcgctgtctctggtggctccatcagcagtggtggttactcctggagctggatccggcagccaccagggaagggcctggagtggattgggtacatctatcatagtgggagcacctactacaacccgtccctcaagagtcgagtcaccatatcagtagacaggtccaagaaccagttctccctgaagctgagctctgtgaccgccgcggacacggccgtgtattactgtgccagagaagggagtggttcggggagcatgaggttcgacccctggggccagggaaccctggtcaccgtctcctcag

SEQ ID NO: 10013 - DNA, 364 bp, Homo sapiens
caggtgcagctggtggagtctgggggaggcgtggtccagcctgggaggtccctgagactctcctgtgcagcctctggattcaccttcagtacctacgctatgcactgggtccgccaggctccaggcaaggggctggagtgggtggcagttatatcatatgatggaagtaataaatactacgcagactccgtgaagggccgattcaccatctccagagacaattccaagaacacgctgtctctgcaaatgaacagcctgagagctgaggacacggctgtgtattactgtgcgagaccgaatagtgggagctacttcagctactttgactactggggccagggaaccctggtcaccgtctcctcag

SEQ ID NO: 10014 - DNA, 364 bp, Homo sapiens
caggtgcagctggtggactctgggggaggcgtggtccagcctgggaggtccctgagactctcctgtgcagcctctggattcatcttcagtacctatgctatgcactgggtccgccaggctccaggcaaggggctggagtgcgtggcagttatatcatatgatggaagtaataaatactatgtagactccgtgaggggccgattcaccatctccagagacaattccaagaacacactgtatctacaaatgaacagcctgagagctgaggacacggctgtgtattactgtgcgagaagtaaaagtgggagctactccgccccctttgactactggggccagggaaccctggtcaccgtctcctcag

SEQ ID NO: 10015 - DNA, 364 bp, Homo sapiens
caggtgcagctggtggagtctgggggaggcgtggtccagcctgggaggtccctgagactctcctgtgcagcctctggattcatcttcagtagctatgctgtgtactgggtccgccaggctccaggcaaggggctggagtgggtggcagttatttcatttgatggaagtaataaatattacgcagactccgtgaggggccgattcaccacctccagagacaattccaagaacacgctgtatttgcaaatgaacagcctgagagtcgaggacacggctatgtattactgtgcgagaagttatagtgggacctacagggggtggttcgacccctggggccagggaaccctggtcaccgtctcctcag

SEQ ID NO: 10016 - DNA, 363 bp, Homo sapiens
caggtgcagctgcaggagtcgggcccaggactggtgaagccttcggagaccctgtccctcacctgcactgtctctggtggctccatcagtagttactactggagctggatccggcagcccgccgggaagggactggagtggattgggcgtatctataccagtgggagcaccaactacaacccctccctcaagagtcgagtcaccatgtcagtagacacgtccaagaaccagttctccctgaagctgagctctgtgaccgccgcggacacggccgtgtattactgtgcgagagatgggtggggatcgccctactactacggtatggacgtctggggccaagggaccacggtcaccgtctcctca

SEQ ID NO: 10017 - DNA, 367 bp, Homo sapiens
caggtgcaggtgctgcagtctggggctgaggtgaagaagcctggggcctcagtgaaggtctcctgcaaggcttctggatacaccttcaccggctactatatacactgggtgcgacaggcccctggacaagggcttgagtggatgggatggatcaaccctaacagtggtgacacaaactatgcacagaggtttcagggcagggtcaccatgaccagggacacgtccatcagcacagcctacatggagttgagcaggctgagatatgacgacacggccgtatattactgtacgagagtggagcctaggggtggctacatttctccttttgatgtctggggccaagggacaatggtcaccgtctcttcag

SEQ ID NO: 10018 - DNA, 364 bp, Homo sapiens
caggtgcagctggtggagtctgggggaggcgtggtccagcctgggaggtccctgagactctcctgtgcagcctctggattcaccttcagtacctatgctatgcactgggtccgccaggctccaggcaaggggctggagtgggtggctgttatatcatatgatggaggtaatgaatactacgcagactccgtgaagggccgattcaccatctccagagacaattccaagaacacgctgtatctgcaaatgaacagcctgagagctgaggacacggctgtgtattactgtgcgagatcggcctcagggggctacaattccccaggcgactactggggccagggaaccctggtcaccgtctcctcag

SEQ ID NO: 10019 - DNA, 364 bp, Homo sapiens
caggtgcagctggtgcagtctggggctgaggtgaagaagcctggggcctcagtgagggtttcctgcaaggcatctggatacaccttcaccaactactatatgcactgggtgcgacaggcccctggacaagggcttgagtgggtgggaataatcaaccctagtggtggtagcacaagctacgcacagaagttccagggcagagtcaccatgaccagggacacgtccacgagcacagtctacatggagctgagcagcctgagatctgaggacacggccgtgtattactgtgcgagagattggttcggggaaccagagggttactttgactactggggccagggaaccctggtcaccgtctcctcag

SEQ ID NO: 10020 - DNA, 367 bp, Homo sapiens
cagctgcagctgcaggaatcgggcccaggactggggaagccttcggagaccctgtccctcacctgcagtgtctctggtggctccatcagcagtagtagttactactggggctggatccgccagcccccagggaaggggctggagtggattgggagtatctcttatagtgggaacacctactacaacccgtccctcaagagtcgagtctccatatccgtagacacgtccaagaaccagttctccctgaagctgagctctgtgaccgccgcagacacggctgtgtattactgtgcgagacatgaagggagtggttatttcgactactttgactactggggccagggaaccctggtcaccgtctcctcag

SEQ ID NO: 10021 - DNA, 367 bp, Homo sapiens
cagctgcagctgcaggagtcgggcccaggactggtgaagccttcggagaccctgtccctcacctgcactgtctctggtggctccatcggcagtagtagttactactggggctggatccgccagcccccagggaaggggctggagtggattgggagtatctattatagtgggagcacctactacaacccgtccctcaagagtcgagtcaccatatccgtagacacgtccaagaaccagttctccctgaagctgagctctgtgaccgccgcagacacggctgtgtattactgtgcgagagtgaaggggtggatacagctatggttcattgactactggggccagggaaccctggtcaccgtctcctcag

SEQ ID NO: 10022 - DNA, 364 bp, Homo sapiens
gaggtgcagctgttggagtctgggggaggcttggtacagcctggggggtccctgagactctcctgtgcagcctctggattcacctttagcagctatgccatgagctgggtccgccaggctccagggaaggggctggagtgggtctcagctattagtggtagtggtggtagcacatactacgcagactccgtgaagggccggttcaccatctccagagacaattccaagaacacgctgtatctgcaaatgaacagcctgagagccgaggacacggccgtatattactgtgcgaaagatcgaagtggttattactatggctactttgactactggggccagggaaccctggtcaccgtctcctcag

SEQ ID NO: 10023 - DNA, 364 bp, Homo sapiens
gaggtgcagctgttggagtctgggggaggcttggtacagcctggggggtccctgagactctcctgtgcagcctctggattcacctttagcagctatgccatgagctgggtccgccaggctccagggaaggggctggagtgggtctcagctattagtggtagtggtggtagcacatactacgcagactccgtgaagggccggttcaccatctccagagacaattccaagaacacgctgtatttggaagtgagcagcctgagaactgaggacacggctgtgtattactgtgcaagaactaacaatgggaactacaacggctactttgactactggggccagggaaccctggtcaccgtctcctcag

SEQ ID NO: 10024 - DNA, 367 bp, Homo sapiens
caggtgcagctgcaggagtcgggcccaggactggtgaagccttcacagaccctgtccctcacctgcactgtctctggtggctccatcagcagtggtaatttctactggagttggatccgccagcacccagggaagggcctggagtggattgggtacagctattacagtgggagcacctactacaacccgtccctcaagagtcgagttaccatatcagtcgacacgtctaagaggcagttctccctgaggctgagctctgtgactgccgcggacacggccgtgtattactgtgcgagaggacacgccttgggagctactaccatctttgactactggggccagggaaccctggtcaccgtctcctcag

SEQ ID NO: 10025 - DNA, 367 bp, Homo sapiens
caggtgcagctgcaggagtcgggcccaggactggtgaagccttcacagaccctgtccctcacctgcactgtctctggtggctccatcagaagtggtggttactactggagctggatccgccagcacccagggaagggcctggagtggattgggtacatctattacagtgggagcacctactacaacccgtccctcaagagtcgagttaccatatcagtagacacgtctgagaaccagttctccctgaagctgagctctgtgactgccgcggacacggccgtgtattactgtgcgagaggcatcttctatgatagtagttaccgctttgactactggggccagggaaccctggtcaccgtctcctcag

SEQ ID NO: 10026 - DNA, 363 bp, Homo sapiens
gaagtgcagctggtgcagtccggagcagaggtgaaaaagcccggggagtctctgaggatctcctgtaagggttctggatacagctttgccacctactggatcagctgggtgcgccagatgcccgggaaaggcctggagtggatggggaggattgatcctagtgactcttataccaactacagcccgtccttccaaggccacgtcaccatctcggctgacaagtccatcaccactgcctacctgcagtggagcaccctgaaggcctcggacaccgccatgtattactgtgcgagacgttccacccagcctccatactggtacttcgatctctggggccgtggcaccctggtcactgtctcctca

SEQ ID NO: 10027 - DNA, 369 bp, Homo sapiens
gaggtgcagctggtggagtctggaggaggcttgatccagcctggggggtccctgagactctcctgtgcagcctctgggttcaccgtcagtagcaactacatgagctgggtccgccaggctccagggaaggggctggagtgggtctcagttatttatagcggtggtagcacatactacgcagactccgtgaagggccgattcaccatctccagagacaattccaagaacacgctgtatcttcaaatgaacagcctgagagccgaggacacggccgtgtattactgtgcggcgccggggcagtaccagctgctatactactactacggtatggacgtctggggccaagggaccacggtcaccgtctcctca

SEQ ID NO: 10028 - DNA, 367 bp, Homo sapiens
caggtgcagctgcaggagtcgggcccaggactggtgaagccttcacagaccctgtccctcacctgcactgtctctggtggctccatcagcagtggtggttactactggagctggatccgccagcacccagggaagggcctggagtggattggctacatcttttacagtgggagcacctactacaacccgtccctcaagagtcgagttaccatatcagtagacacgtctaagaaccagttctccctgaagctgacctctgtgactgccgcggacacggccgtatattactgtgcgacgtgcctcgacagccctacccggtggtacttcgatctctggggccgtggcaccctggtcactgtctcctcag

SEQ ID NO: 10029 - DNA, 364 bp, Homo sapiens
caggtccagctggtacagtctggggctgaggtgaagaagcctggggcctcagtgaaggtctcctgcaaggtttccggatacaccctcattgaattatccatgcactgggtgcgacaggctcctggaaaagggctggagtggatgggaggttttgatcctgaagatggtgaaacaatctacgcacagaagttccagggcagagtcaccatgaccgaggacacatctacagacacagcctacatggagctgagcagcctgagatctgacgactcggccctatattactgtgcaacagggtcggctatgtttcggagagactggttcgacccctggggccagggaaccctggtcaccgtctcctcag

SEQ ID NO: 10030 - DNA, 364 bp, Homo sapiens
caggtccagctggtacagtctggggctgaggtgaagaagcctggggcctcagtgacagtctcctgcaaggtttccggatacaccctcattgaattacccatacactgggtgcgacaggctcctgcagaagggcttgagtggatgggaggttttgatcctgaagatggtgaaacaatctacgcacagaagttccagggaagagtcaccatgaccgaggacacatctacagacacagcctacatggagctgagcagcctgagatctgaggacacggccgtgtattactgtgcaacaagcgcggctgtaatgcgccataactggctcgacccctggggccagggaaccctggtcaccgtctcctcag

SEQ ID NO: 10031 - DNA, 364 bp, Homo sapiens
caggtccagctggtacagtctggggctgaggtgaagaagcctggggcctcagtgaaggtctcctgcaaggtttccggatacacccttgttgagttatccatgcactgggtgcgacaggctcctggaaaagggcttgagtggatgggaggttttgatcctgaagatggtgaaacaatctacgcagagaagttccagggcagagtcaccgtgaccgaggacacatctacagacacagcctacatggagctgagcagcctgagatctgaggacacggccgtgtattactgtacaacaggatcccccttagtggtgccgaactggctcgacccctggggccagggaacccaggtcaccgtctcctcag

SEQ ID NO: 10032 - DNA, 367 bp, Homo sapiens
gaggtgcagctggtggagtctgggggaggcttggtccagcctggggggtccctgagactctcctgtgcagcctctggattcacctttagtagctattggatgagctgggtccgccaggctccagggaaggggctggagtgggtggccaacataaagcaagatggaagtgagaaatactatgtggactctgtgaagggccgattcaccatctccagagacaacgccaagaactcactgtatctgcaaatgaacagcctgagagccgaggacacggctgtgtattactgtgcgagagagtatagtggctacgattactttcgctggttcgacccctggggccagggaaccctggtcaccgtctcctcag

SEQ ID NO: 10033 - DNA, 364 bp, Homo sapiens
caggtccggctggtacagtctggggctgaggtgaagaagcctggggcctcagtgaaggtctcctgcaaggtttccggatacaccctccctgaattatccatacactgggtgcgacaggctcctggaaaagggcttgagtggatggggggctttgatcctgaagatggtgaaacaatctacgcacagaagttccagggcagagtcaccatgaccgaggacacatctacagacacagcctacatggagctgagcagcctgagatctgaggacacggccgtatattattgtgtaacaactccggcaatagtaaggagggactggttcgacccctggggccagggaaccctggtcaccgtctcctcag

SEQ ID NO: 10034 - DNA, 364 bp, Homo sapiens
caggtgcagctggtgcaatctggggctgaggtgaagaagcctggggcctcagtgaaggtctcctgcaaggcttctggatacaccttcaccggctactatatacactgggtgcgacaggcccctggacaagggcttgagtggatgggatggatcaaccctaacagtggtggcacaaactttgcacagaagtttcggggcagggtcaccatgaccagggccacgtccatcagcacagcctacatggagctgaactggctgagatctgacgacacggccgtgtattactgtgcgagagatcggggctctcatgaggactggtacttcgatctctggggccgtggcaccctggtcactgtctcctcag

SEQ ID NO: 10035 - DNA, 375 bp, Homo sapiens
cagctgcagctgcaggagtcgggcccaggactggtgaagccttcggagaccctgtccctcacctgcacagtctctggtggctccatcagcagtagtagttattactggggctggatccgccagcccccagggaaggggctggagtggattggaaatatctattatagtgggagcacctactacaacccgtccctcaagagtcgagtcaccatatccgtagacacgtccaagaaccacttctccctgaagctgagctctgtgaccgccgcagatacggctgtatattactgtgcgggagaactagtagtaccaactgccttctactcctacggtatggacgtctggggccaagggaccacggtcaccgtctcctca

SEQ ID NO: 10036 - DNA, 375 bp, Homo sapiens
cagctgcagctgcaggagtcgggcccaggactggtgaagccttcggagaccctgtccctcacctgcactgtctctggtggctccatcagcagtagtagttactactggggctggatccgccagcccccagggaaggggctggagtggattgggactatctatcatagtgggagcacctactacaacccgtccctcaagagtcgagtcaccatatccgtagacacgtccaagaaccaattctccctgaagctgagctctgtgaccgccgcagacacggctgtgtattactgtgcgggtgtatcggttcggttgggccagatccactactacggtatggacgtctggggccaagggaccacggtcaccgtctcctca

SEQ ID NO: 10037 - DNA, 375 bp, Homo sapiens
caggtgcagctgcaggagtcgggcccaggactggtgaagccttcggagaccctgtccctcacctgcactgtctctggtggctccgtcagcagtggtagttactactggagctggatccggcagcccccagggaagggactggagtggattgggtatatctattacagtgggagcaccaactacaacccctccctcaagagtcgagtcaccatatcagtagacacgtccaagaaccagttctccctgaagctgagctctgtgaccgctgcggacacggccgtgtattactgtgcgaggacttcgtattacgatttttggagtggtcactacggtatggacgtctggggccaagggaccacggtcaccgtctcctca

SEQ ID NO: 10038 - DNA, 375 bp, Homo sapiens
caggtgcagctgcaggagtcgggcccaggactggtgaagccttcacagaccctgtccctcacctgcactgtctctggtggcaccatcaacactggtggtttctactggagctggatccgccagcacccagggaagggcctggagtggattgggtacatctattacagtgggagcacctactacaacccgtccctcaagagtcgagttaccatatcagtagacacgtctaagaaccagttctccctgaagctgagctctgtgactgccgcggacacggccgtgtattactgtgcgagcgcttcctattacgatttaagacctgtgtcctacggtatggacgtctggggccaagggaccacggtcaccgtctcctca

SEQ ID NO: 10039 - DNA, 372 bp, Homo sapiens
caggtgcagctggtgcagtctggggctgaggtgaagaagcctggggcctcagtgaaggtctcctgcaaggcttctggatacaccttcaccggctactatatgcactgggtgcgacaggcccctggacaagggcttgagtggatgggatggatcaaccctaacagtggtggcacaaactatgcacagaagtttcagggcagggtcaccatgaccagggacacgtccatcagcacagcctacatggagctgagcaggctgagatctgacgacacggccgtgtattactgtgcgagatttacgatttttggagtggcccggtttcgggacggtatggacgtctggggccaagggaccacggtcaccgtctcctca

SEQ ID NO: 10040 - DNA, 372 bp, Homo sapiens
caggtgcagctggtggagtctgggggaggcgtggtccagcctgggaggtccctgagactctcctgtgcagcctctggattcaccttcagtagctatgctatgcactgggtccgccaggctccaggcaaggggctggagtgggtggcagttatatcatatgatggaaataataaatactacgcagactccgtgaagggccgattcaccatctccagagacaattccaagaacacgctgtatctgcaaatgaacagcctgagagctgaggacacggctgtgtattactgtgtgagagatgtgaacacctatggtgtctactactactacggtatggacgtctggggccaagggaccacggtcaccgtctcctca

SEQ ID NO: 10041 - DNA, 372 bp, Homo sapiens
caggtgctgctggtggagtctgggggaggcgtggtccagcctgggaggtccctgagactctcctgtgcagcctctggattcagcctcagtgactatggcatgcactgggtccgccaggctccaggcaaggggctggagtgggtggcagttatatcatatgatggaagtactaaatactatgaagactccgtgaagggccgactcaccatctccagagacaattccaagaacacggtatatctgcaaatgaacagcctgagacctgaggacacggctgcgtattactgtgcgagaccgagatggctacaatttggctacttctactacggtatggacgtctggggccaagggaccacggtcaccgtctcctca

SEQ ID NO: 10042 - DNA, 367 bp, Homo sapiens
caggtgcagctggtggagtctgggggaggcgtggtccagcctgggaggtccctgagactctcctgtgcagcgtctggattcaccttcagcagctatggcatgcactgggtccgccaggctccaggcaaggggctggagtgggtggcggttatatactatgatggaaataataaatattatgcagagtccgtgaagggccgattcaccatctccagagacaattccaagaacacgctgaatctgcaaatgaacagcctgagagccgaggacacggctgtgtattactgtgcgagagagagttttatagaagtggctggtaccagccttgaccactggggccagggaaccctggtcaccgtctcctcag

SEQ ID NO: 10043 - DNA, 376 bp, Homo sapiens
cagttgcagctgcaggagtcgggcccaggactggtgaggccttcggagaccctgtccctcacctgcactgtctctggtggctccatcagcagtagtggttactactggggctggatccgccagcccccagggaaggggctggagtggattgggagtatctattatagtgggagcacctactacaacccgtccctcaagagtcgagtcaccatatccgtagacacatccaagaatcagttctccctgaggctgagctctgtgaccgccgcagacacggctctatattactgtgcgagtcatactgtggtggtgactgctatcccttactggtacttcgatctctggggccgtggcaccctggtcactgtctcctcag

SEQ ID NO: 10044 - DNA, 375 bp, Homo sapiens
caggtcaccttgagggagtctggtcctgcgctggtgaaacccacacagaccctcacactgacctgcaccttctctgggttctcactcagcactagtggaatgtctgtgagctggatccgtcagcccccagggaaggccctggagtggcttgcagtcattgattgggatgataataaatattacagcacatctctgaagaccaggctcaccatctccagggacacctccaaaccccaggtggtccttacaatgaccaacatggaccctgtggacacaggcacctattactgtgcacggataagatattttcattggttcccccatcccaacggtatggacgtctggggccaagggaccacggtcaccgtctcctca

SEQ ID NO: 10045 - DNA, 370 bp, Homo sapiens
gaggtgcagctggtggagtctggaggaggcttgatccagcctggggggtccctgagactctcctgtgcagcctctgggttcaccgtcagtagcgaccacatgagctgggtccgccaggctccagggaaggggctggagtgggtctcagttatctatagcggtggtagcacatactacgcagactccgtgaagggccgattcaccatctccagagacaattccaagaacacgctttatcttcaaatgaacagcctgagagccgaggacacggccgtgtattactgtgcgagagatcccccctcgtacggtggtaactcttggggtgactttgactactggggccagggaaccctggtcaccgtctcctcag

SEQ ID NO: 10046 - DNA, 376 bp, Homo sapiens
caggtcaccttgaaggagtctggtcctgtgctggtgaaacccacagagaccctcacgctgacctgcaccgtctctgggttctcactcagcaatgctagaatgggtgtgagctggatccgtcagcccccagggaaggccctggagtggcttgcacacattttttcgaatgacgagaaatcctacagcacatctctgaagaccaggctcaccatctccaaggacacctccagaagccaggtggtccttaccatgaccaagatggaccctgtggacacagccacatattactgtgcacggattacctacgagcagtggctaatacactactggtacttcgatctctggggccgtggcaccctggtcactgtctcctcag

SEQ ID NO: 10047 - DNA, 367 bp, Homo sapiens
ggtgcagctgcaggagtcgggcccaggactggtgacgccttcggagaccctgtccctcacctgcactgtctctggtggctccctcagtagttcctactggagctggatccggcagcccccagggaagggactggagtggattggctatatctcttacagtgggagcaccaactacaacccctccctcaagagtcgagtcaccatttcagtggacacgtccaagaaccagttctccctgaagctgagctctgtgaccgctgcggacacggccgtgtattactgtgcgagaggggagggggaagggccttacttctactactacggtctggacgtctggggccaagggaccacggtcaccgtctcctca

SEQ ID NO: 10048 - DNA, 372 bp, Homo sapiens
gaggtgcagctggtgcagtctggagcagaggtgaaaaagcccggggagtctctgaagatctcctgtaagggttctggatacagctttaccagttactggatcggctgggtgcgccagatgcccgggaaaggcctggagtggatgggaatcatctatcctggtgactctgatatcagatacagcccgtccttccaaggccaggtcaccatctcagccgacaagtccatcagcaccgcctacctgcagtggagcagcctgaaggcctcggacaccgccatgtattactgtgcgagacggggccccggaggcggtaagttctactactacggtatggacgtctggggccaagggaccacggtcaccgtctcctca

SEQ ID NO: 10049 - DNA, 370 bp, Homo sapiens
caggtgcagctgcaggagtcgggcccaggactggtgaagccttcggagaccctgtccctcacctgcactgtctctggtggctccatcagtagttactactggagctggatccggcagcccgccgggaagggactggagtggattgggcgtatctataccagtgggagcaccaactacaacccctccctcaagagtcgagtcaccatgtcagtagacacgtccaagaaccagttctccctgaagctgagctctgtgaccgccgcggacacggccgtgtattactgtgcgagagtggctgacggtagttactatgatagtagtggttactttgactactggggccagggaaccctggtcaccgtctcctcag

SEQ ID NO: 10050 - DNA, 373 bp, Homo sapiens
caggtgcagctggtggagtctgggggaggcgtggtccagcctgggaggtccctgagactctcctgtgcagcgtctggattcaccttcagtaactatggcatgcactgggtccgccaggctccaggcaaggggctggagtgggtggccgttatatggtatgatggaagtaataaatattatgcagactccgtgaagggccgattcaccatttccagagacaattccaagaacacgttgtatctgcaaatgcacagcctgagagtcgaggacacggctgtgtattactgtgcgggagatatacccccgcatagtagtactttagaggaaaattttgactactggggccagggaaccctggtcaccgtcacctcag

SEQ ID NO: 10051 - DNA, 376 bp, Homo sapiens
caggtcaccttgagggagtctggtcctgcgctggtgaaacccacacagaccctcacactgacctgcaccttctctgggttctcactcagcactagtggaatgtgtgtgagctggatccgtcagcccccagggaaggccctggagtggcttgcactcattgattgggatgatgataaatactacagcacttctctgaggaccagggtcaccatctccaaggacacctccaaaaaccaggtggtccttacaatgaccaacatggaccctgtggacacagccacgtattactgtgcacggatagtcatctccatctatgaaaatagtcaaagcggttttgactactggggccagggaaccctggtcaccgtctcctcag

SEQ ID NO: 10052 - DNA, 370 bp, Homo sapiens
caggtgcagctacagcagtggggcgcaggactgttgaagccttcggagaccctgtccctcacctgcgctgtctatggtgggtccttcagtggttactactggagctggatccgccagcccccagggaaggggctggagtggattggggaaatcaatcatagtggaagcaccaactacaacccgtccctcaagagtcgagtcaccatatcagtagacacgtccaagaaccagttctccctgaagctgagctctgtgaccgccgcggacacggctgtgtattactgtgcgagagaccggagacgtgccattggggcgccagtggctgggatagactactggggccagggaaccctggtcaccgtctcctcag

SEQ ID NO: 10053 - DNA, 367 bp, Homo sapiens
caggtgcagctggtggagtctgggggaggcgtggtccagcctgggaggtccctgagactctcctgtgcagcgtctggattcattttcagtagctatggcatgcactgggtccgccaggctccaggcaaggggctggagtgggtggcacttatatggtataatggaagtaagaaatactatgcagactccgtgaagggccgattcaccatctccagagacaattccaagaacacggtatatctgcaaatgaacagcctgagagccgaggacacggctgtgtattactgtgcgagagaccccggggaccctacggtgactacgtcctttgacaactggggccagggaaccctgatcaccgtctcctcag

SEQ ID NO: 10054 - DNA, 376 bp, Homo sapiens
cagctgcagctgcaggagtcgggcccaggactggtgaagccttcggagaccctgtccctcacctgcactgtctctggtggctccatcagcagtagtagttactactggggctggatccgccagcccccagggaaggggctggagtggattgggagtatctattatagtgggagcacctactacaacccgtccctcaagagtcgagtcaccatatccgtagacacgtccaagaaccagttctccctgaagctgagctctgtgaccgccgcagacacggctgtgtattactgtgcgagacatttgtcagacgctgtagagaaatatagcagcagctgggactactggggccagggaaccctggtcaccgtctcctcag

SEQ ID NO: 10055 - DNA, 376 bp, Homo sapiens
cagctgcagctgcaggagtcgggcccaggactggtgaagccttcggagaccctgtccctcacctgcactgtctctggtggctccatcagcagtagtagttactactggggctggatccgccagcccccagggaaggggctggagtggattgggagtatctattatagtgggagcacctactacaacccgtccctcaagagtcgagtcaccatatccgtagacacgtccaagaaccagttctccctgaagctgagctctgtgaccgccgcagacacggctgtgtattactgtgcgagacaagggatgggaaggagacgtagcagtggctggtacgtaggctactggggccagggaaccctggtcaccgtctcctcag

SEQ ID NO: 10056 - DNA, 373 bp, Homo sapiens
gaagtgcagctggtggagtctgggggaggcttggtacagcctggcaggtccctgagactctcctgtgcagcctctggattcacctttgatgattatgccatgcactgggtccggcaagctccagggaagggcctggagtgggtctcaggtattagttggaatagtggtagcataggctatgcggactctgtgaagggccgattcaccatctccagagacaacgccaagaaatccctgtatctgcaaatgaacagtctgagagctgaggacacggccttgtattactgtgcaaaagctgagggccccttactatggttcggggagttatctcttgactactggggccagggaaccctggtcaccgtctcctcag

SEQ ID NO: 10057 - DNA, 373 bp, Homo sapiens
caggtgcaactggtgcagtctggggctgaggtgatgaagcctggggcctcagtgaaggtctcctgcaaggcttctggatacaccttcagcggccactacatacactgggtgcgacaggcccctggacaagggcttgagtggatgggatggatcaaccctaacagtggtgccacaaactatgcacagaaatttcagggcagggtcaccatgaccagggacacgtccatcagcacagcctacatggagctgagcaggctgacatctgacgacacggccgcgtattactgtgcgagagggcactcttgtaatagtgccagctgctataaagtctttgactactggggccagggaaccctggtcaccgtctcctcag

SEQ ID NO: 10058 - DNA, 376 bp, Homo sapiens
caggtgcagctgcaggagtcgggcccaggactggtgaagccttcacagaccctgtccctcacctgcactgtctctggtgactccatcagcagtggtttttactactggagctggatccgccagcacccagggaagggcctggagtggattgggtacatctattacagtgggagcacctactgcaacccgtccctcaagagtcgagttaccatatcagtagacacgtctaagaaccagttctccctgaagctgagctctgtgactgccgcggacacggccgtttattactgtgcgagaaccatgatagtagtggacacccgccgtaggtactactttgactactggggccagggaaccctggtcaccgtctcctcag

SEQ ID NO: 10059 - DNA, 373 bp, Homo sapiens
gaggtgcagctggtggagtctgggggaggcttggtacagcctggggggtccctgagactctcctgtgcagcctctggattccccttcagtacctatagcatgaactgggtccgccaggctccagggaaggggctggagtggatttcatatattactagtggtagtagtaccatatattacgcagactctgtgaagggccggttcaccatctccagagacaatgccaagaactcactgtatctgcaaatgaacagcctgagagacgaggacacggctgtgtattactgtgcgagagatcaatatcggggcagtggctggaccttggggaattttgactactggggccagggaaccctggtcaccgtctcctcag

SEQ ID NO: 10060 - DNA, 373 bp, Homo sapiens
gaggtgcagctggtggagtctgggggaggcttggtacagcctggggggtccctgagactctcctgtgcagcctctggattcaccttcagtagctatagcatgaactgggtccgccaggctccagggaaggggctggagtgggtttcatacattagtagtagtagtagtaccatatactacgcagactctgtgaagggccgattcaccatctccagagacaatgccaagaactcactgtatctgcaaatgaacagcctgagagacgaggacacggctgtgtattactgtgcgagggtctattccctcgatagggggagctactggcggccgattgactactggggccagggaaccctggtcaccgtctcctcag

SEQ ID NO: 10061 - DNA, 379 bp, Homo sapiens
gaggtgcagctggtggcgtctgggggaggcttggtaaagccagggcggtccctgagactctcctgtacagcttctgcattcacctttggtgattatgctatgagctggttccgccaggctccagggaaggggctggagtgggtaggtttcattagaaccaaagcttttggtgggacaacagaatacgccgcgtctgtgaaaggcagattcaccatctcaagagatgattccaaaagcatcgcctatctgcaaatgaacagcctgaaaaccgaggacacagccgtgtattactgtgctagaagggcgtatcactatggttcgggccgggggtactactttgacttctggggccagggaaccctggtcgccgtctcctcag

SEQ ID NO: 10062 - DNA, 379 bp, Homo sapiens
gaggtgcaactggtggagtctgggggaggcttggtaaagccagggcggtccctgagactctcctgtacagcttctggattcacctttggtgattatgctatgagctggttccgccaggctccagggaaggggctggagtgggtaggtttcattagaagcaaagcttatggtgggacaacagaatacgccgcgtctgtgaaaggcagattcaccatctcaagagatgatcccaaaagcagcgcctatctgcaaatgagcagcctgaaaaccgaggacacagccgtgtattactgtactagaagggcgtattactatggttcgggccgggggtactactttgactactggggccagggaaccctggtcaccgtctcctcag

SEQ ID NO: 10063 - DNA, 367 bp, Homo sapiens
caggtgcagctggtggagtctgggggaggcgtggtccagcctgggaggtccctgagactctcctgtgcagcgtctggattcaccttcagtaattatggcatgcactgggtccgccaggccccaggcaaggggctggagtgggtggcagttatatggtttgatggaagtaaaaaatactatgcagactccgtgaagggccgattcaccatctccagagacaattccaagaacacgctgtatctgcaaatgaacagcctgagagtcgaggacacggctgtgtattactgtgcgagagattttggggtagagatggctacaattgggacggactcctggggccagggaaccctggtcatcgtctcctcag

SEQ ID NO: 10064 - DNA, 373 bp, Homo sapiens
gaagtgcagctggtggagtctgggggaggcttggtacagcctggcaggtccctgagactctcctgtgcagcctctggattcacctttgatgattatgccatgcactgggtccggcaagctccagggaagggcctggagtgggtctcaggtattagttggaatagtggtagcataggctatgcggactctgtgaagggccgattcaccatctccagagacaacgccaagaactccctgtatctgcaaatgaacagtctgagagctgaggacacggccttgtattactgtgcaaaagagtcgaaatcactatggttcggggatcgggggtacttcgatctctggggccgtggcaccctggtcactgtctcctcag

SEQ ID NO: 10065 - DNA, 373 bp, Homo sapiens
caggtccagctggtacagtctggggctgaggtgaagaagcctggggcctcagtgaaggtctcctgcaaggtttccggatacaccctcactgaattatccatgcactgggtgcgacaggctcctggaaaagggctggaatggatgggaggtgttgatcctgaagatggtgaaacatactacgcacagacgttccagggcagagtcaccatgaccgaggacacatctacaggcacagcctacatggagctgagcagcctgagatctgaggacacggccgtgtattactgtgcaacctcggattactttgtttcggggagtttttccttacactttgacaactggggccagggaaccctggtcaccgtctcctcag

SEQ ID NO: 10066 - DNA, 373 bp, Homo sapiens
caggtccagctggtacagtctggggctgaggtgaagaagcctggggcctcagtgaaggtctcctgcaaggtttccggatacaccctcactgaattatccatgcactgggtgcgacaggctcctggaaaagggcttgagtggatgggaggttttgatcctgaagatggtgaaacaatctacgcacagaagttccagggcagagtcaccatgaccgaggacacatctacagacacagcctacatggagctgagcagcctgagatctgaggacacggccgtgtattactgtgcaacagcctatgcatattgtggtggtgactgctattccccccttgattactggggccagggaaccctggtcaccgtctcatcag

SEQ ID NO: 10067 - DNA, 373 bp, Homo sapiens
caggtgcagctggtgcagtctggggctgaggtgaagaagcctggggcctcagtgaaggtctcctgcaaggcttctggatacaccttcaccgactactatatgcactgggtgcgacaggcccccggacaagggcttgagtggatggggtggatcgaccctaacaccggtggcacaaactatccacagaagtttcagggcagggtcagcatgaccagggacacgtccattagcacagcccacctggaactgagcaggctcagatctgacgacacggccgtgtattattgtgcgaaagcttttggggtgtattaccgtgatagtagtggaccgctcgacccctggggccagggaaccctggtcaccgtctcctcag

SEQ ID NO: 10068 - DNA, 370 bp, Homo sapiens
caggtgcagctacagcagtggggcgcaggactgttgaagccttcggagaccctgtccctcacctgcgctgtctatggtgggtccttcagtggttactactggagctggatccgccagcccccagggaaggggctggagtggattggggaaatcaatcatagtggaagcaccaactacaacccgtccctcaagagtcgagtcaccatatcagtagacacgtccaagaaccagttctccctgaagctgagctctgtgaccgccgcggacacggctgtgtattactgtgcgagaggctcggttcggggagttctttccccccatggttggttcgacccctggggccagggaaccctggtcaccgtctcctcag

SEQ ID NO: 10069 - DNA, 373 bp, Homo sapiens
caggttcacctggtgcagtctggggctgaggtgaagaagcctggggcctcagtgaaggtttcctgcaaggcatctggaaatatcttcaccacctactatatacactgggtgcgacaggcccctggacaagggcttgagtggatgggaatgatcaaccctagtgctggtagcagaaactacgcacagaagttccagggcagagtcaccatgacctgggacacgtccacgagcacagtctacatggaggtgagcagcctgagatctgaggacacggccgtgtattactgtgcgagaagttattattatgatggtagtggtcccagggactactttgaatactggggccagggaaccctggtcaccgtctcctcag

SEQ ID NO: 10070 - DNA, 373 bp, Homo sapiens
caggtgcagctggtgcagtctggggctgaggtgaaggagcctggggcctcagtgaaggtttcctgcaaggcatctggatacaccttcaccaactactatatgcactgggtgcgacaggcccctggacaagggcttgagtggatggggataatcaaccctagtgctaataccacaagctacgcacagaagttccagggcagagtcaccatgaccagggacacgtccacgagcacagtctacatggagctgagcagcctgagatctgaggacacggccgtgtattactgtgcgcgcggcaattatgatttttggaataattacagaacggtctttgactactggggccagggaaccctggtcaccgtctcctcag

SEQ ID NO: 10071 - DNA, 373 bp, Homo sapiens
caggtgcagctggtgcagtctggggctgagatgaagaagcctggggccccagtgagggtttcctgcaaggcatctggatacaccttcacgagctactctatgcactgggtgcgacaggcccctggacaagggcttgagtggatgggaattatcaaccctagtagtggtagcacaagctacgcacagaagttcaagggcagagtcaccatgaccagcgacacgtccacgagcacagtctatatggagctgaacagcctgagatctgaggacacggccgtgtattactgtgcgcgcggcaattacgatgtttggagtggttacagaacggtctttgacaactggggccagggaaccctggtcaccgtctcctcag

SEQ ID NO: 10072 - DNA, 373 bp, Homo sapiens
caggtgcagctggtgcagtctggggctgaggtgaagaagcctggggcctcagtgaaagtttcctgcaaggcatctggagacaccttcaccagctactatatgcactgggtgcgacaggcccctggacaagggcttgagtggatgggaataatcaaccctagtggtgggagcacaacctacgcacagaagttccagggcagagtcaccatgaccggggacacgtccacgagcacagtgtacatggagctgagcagcctgagatctgaggacacggccatatatttctgtgcgagagggggactagtaccagctgggagacaccacaggtcctttgactactggggccggggaaccctggtcaccgtctcctcag

SEQ ID NO: 10073 - DNA, 367 bp, Homo sapiens
caggtgcagctggtggagtctgggggaggcgtggtccagcctgggaggtccctgagactctcctgtgcagcgtctggattcaccttcagtagctttggcatgcactgggtccgccaggctccaggcaaggggctggagtggctggcagttatatggtatgatggaagtaataaatactatgcagactccgtgaagggccgattcaccatctccagagacaattccaagaacacgctgtatctgcaaatgaacagcctgagagccgaggacacggctgtgtattactgtgcgagagattttcaagtcagcagctctcctacagatcttgactactggggccagggaaccctggtcaccgtctccccag

SEQ ID NO: 10074 - DNA, 373 bp, Homo sapiens
caggtgcagctggtgcagtctggggctgaggtgaagaagcctggggcctcagtgaaggtttcctgcaaggcatctggatacagcttcaccaactactatatgcactgggtgcgacaggcccctggacaagggcttgagtggatgggattaatcaaccctagtggtggtaccacaagctacgcacagaagttccagggcagagtcaccatgaccagggacacgtccacgagcacagtctacatggagctgagcagcctgagatctgaggacacggccgtgtattattgtgcgcgcggcaattacgatttttggagtgattacagaacggtctttgactactggggccagggaaccctggtcaccgtctcctcag

SEQ ID NO: 10075 - DNA, 373 bp, Homo sapiens
gaggtgcagctgttggagtctgggggaggcttggtacagcctggggggtccctgagactctcctgtgcagcctctggattcacctttagcaactatgccgtgagctgggtccgccaggctccagggaaggggctggagtgggtctcgactattagtggtagtggtggtagcgcatactacgcagactccgtgaagggccggttcaccatctccagagacaattccaagaacacgctgtatctgcaaatgaacagcctgagagccgaggacacggccgtattttactgtgcgaaagatccttatgattacgtttgggggagcttccactactttgactactggggccagggaaccctggtcaccgtctcctcag

SEQ ID NO: 10076 - DNA, 373 bp, Homo sapiens
gaggtgcgattgttggactctgggggaggcttggtacagcctggggggtccctgagactctcctgtacagcctctggattcacctttaacagctatgccatgagctgggtccgccaggctccagggaagggactggagtgggtctcttctattggtggtaatggtggtagttcatactatgcagactccgtgaagggccggttcaccatctccagagacaattccaagagcacgttgtttctgcaaatgaacagcctgagagccgaggacacggccgtctattactgtgcgaaactaaatgcgttctattgtagtggaggtgcctgctacataacctattggggccagggaacccgggtcaccgtctcctcag

SEQ ID NO: 10077 - DNA, 373 bp, Homo sapiens
gaggtgctcctgttggagtctgggggaggcttggtacagcctggggggtccctgagactctcctgtgcaggctctggatacacctttagtaattatgccatgaactgggtccgccaggttgcagggaaggggctggagcgggtctcaggtatcagtggaagtggcgacagcagatactacgcagactatgtgaagggccggttctccatctccagagacaattccaagaacacactctatctggaaatgaacagcctgacagccgaggacacggccttatatttctgtgcgaggcatagtgggacctacttctggggctctacggcctactttgactgctggggccagggaaccctggtcaccgtctcctcag

SEQ ID NO: 10078 - DNA, 373 bp, Homo sapiens
caggtgcagctggtggagtctgggggaggcgtggtccaacctgggaggtccctgagactctcctgtgcagcctctggattcaccttcagtacctttgctatgcactgggtccgccagcctccaggcaaggggctggagtgggtggcagtcatatcatatgatgcaaataataaatattacgcagactccctgaagggccgattcaccatctccagagacaattccaagaacacactgtttctgcaaatgaacagcctgagaactgaggacacggctgtatattactgtgcgaggtctgcatataacaacaaatgggacttgggtgaagcttttgatatgtggggcccagggacaatggtcaccgtctcttcag

SEQ ID NO: 10079 - DNA, 373 bp, Homo sapiens
caggtgcagctggtggagtcggggggaggcgtggtccaacctgggaggtccctgagactctcctgtgcagcctctggattcaccttcagtacctttgctatgcactgggtccgccagcctccaggcaaggggctggagtgggtggcagtcatatcatatgatgcaaataataaatattacgcagactccctgaagggccgattcaccatctccagagacaattccaagaacacactgtttctgcaaatgaacagcctgagaactgaggacacggctgtatattactgtgcgaggtctggatataacaagaactgggacttgggtgaagcttttgatatgtggggccaagggacaatggtcatcgtctcttcag

SEQ ID NO: 10080 - DNA, 376 bp, Homo sapiens
cagctgcagctgcaggagtcgggcccaggactggtgaagccttcggagaccctgtccctcacctgcactgtctctggtggctccatcagcagtagtttttactactgggcctggatccgccagcccccagggaaggggctggagtggattgggagtatctattatagtggcagcacctactacaacccgtccctcaagagtcgagtcaccatatccgtagacacgtccaagaaccagttctccctgaagctgagctctgtgaccgccgcagacacggctctctattactgtgcgagaatgcatatttaccagtggctggcatctccgtcctggttcgacccctggggccagggaaccctggtcaccgtctcctcag

SEQ ID NO: 10081 - DNA, 376 bp, Homo sapiens
cagctgcagctgcaggagtcgggcccaggactggtgaagccttcggagaccctgtccctcacctgcactgtctctggtggctccatcagcagtagtagttactactggggctggatccgccagcccccagggaaggggctggagtggattgggagtatctattatagtgggagcacctactacaacccgtccctcaagagtcgagtcaccatatccgtagacacgtccaagaaccagttctccctgaagctgagctctgtgaccgccgcagacacggctgtgtattactgtgcgagacaatgggggttacgatattttgactggctaaactggttcgacccctggggccagggaaccctggtcaccgtctcctcag

SEQ ID NO: 10082 - DNA, 376 bp, Homo sapiens
cagctgcagctgcaggagtcgggcccaagactggtgcagccttcggagaccctgtccctcacctgcactgtctctggtgactccatcagcagtagtagttactactggggctggatccgccagcccccagggaaggggctggagtggattgggagtatctattataatgggaacacctactacaacccgtccctcaagagtcgagtcaccatatccgtagacacgtccaagaacctgttctccctgaagttgagctctgtgaccgccgcagacacggctgtctattactgtgcgagaccacttctgatgtatagcaccagacaaacggggtggttcgacccctggggccagggaaccctggtcaccgtctcctcag

SEQ ID NO: 10083 - DNA, 376 bp, Homo sapiens
caggtcaccttgagggagtctggtcctgcgctggtgaaacccacacagaccctcacactgacctgcaccttctctgggttctcactcagcactagtggaatgtgtgtgagttggatccgtcagcccccagggaaggccctggagtggcttgcactcattgattgggatgatgataaaaattataacacatctctgaagaccaggctcagcatctccaaggacacctccaaaaaccaggtggtccttacaatgaccaatatggaccctgtggacacagccacctattactgtgcacggagctcaaacagtgggagctactcttggtatgatgcttttgatgtctggggccaagggacaatggtcaccgtctcttcag

SEQ ID NO: 10084 - DNA, 367 bp, Homo sapiens
gaagtgcagctggtgcagtccggagcagaggtgaaaaagcccggggagtctctgaggatctcctgtaagggttctggatacacctttaccaactactggatcagctgggtgcgccagatgcccgggaaaggcctggagtggatggggaagattgatcctggtgactcttataccaactacagcccgtccttccaaggccacgtcaccatctcagctgacaggtccttcagcactgcctacctgcagtggagcagcctgaaggcctcggacaccgccatgtattactgtgcgagactcggcttgccccttcatcaggccgcgtggcttgactactggggccagggaaccctggtcaccgtctcctcag

SEQ ID NO: 10085 - DNA, 375 bp, Homo sapiens
caggtgcaactgcaggagtcgggcccaggactggtgaagccttcacagaccctgtccctcacctgcactgtctctgctgactccatcagcagtggtgcttactactggagctggatccgccagcacccagggaagggcctggagtggattgggtacatctattacagtgggagcacctactacaacccgtccctcaggagtcgagttaccatatcagtagacacgtctaagaaccagttctccctgaagctgagctctgtgactgccgcggacacggccgtgtattactgtgcgagaacggcgggtgcgttaggtttggcccggaacaactggttcgacccctggggccagggaaccctggtcaccgtctcctca

SEQ ID NO: 10086 - DNA, 376 bp, Homo sapiens
caggtgcagctgcaggagtcgggcccaggactggtgaagccttcacagaccctgtccctcacctgcgctgtctctggtggctccatcagcagtggtggttactcctggagctggatccggcagccaccagggaagggactggagtggattgggtatatctattacagtgggagcacctactacaacccgtccctcaagagtcgagttaccatatcagtagacacgtccaagaaccagttctccctgaagctgagctctgtgaccgccgcggacacggccgtgtattactgtgccagagggttcaattactatgatagtagtggcccccagacctttgactactggggccagggaaccctggtcaccgtctcctcag

SEQ ID NO: 10087 - DNA, 376 bp, Homo sapiens
caggtgcagctgcaggagtcgggcccaggactggtgaagccttcacagaccctgtccctcacctgcactgtctctggtggctccatcagcagtggtggttactactggagctggatccgccagcacccagggaagggcctggagtggattgggtacatctattacagtgggagcacctactacaacccgtccctcaagagtcgagttaccatatcagtagacacgtctaagaaccagttctccctgaagctgagctctgtgactgccgcggacacggccgtgtattactgtgcgagagaggagtatagcagtggctggtacggcggtcgatacttccagcactggggccagggcaccctggtcaccgtctcctcag

SEQ ID NO: 10088 - DNA, 373 bp, Homo sapiens
caggtgcagctggtgcagtctggggctgaggtgaagaagcctgggtcctcggtgaaggtctcctgcaaggcttctggaggcaccttcagcagctatgctttcagctgggtgcgacaggcccctggacaagggcttgagtggatgggggggatcatccctctctttggtacaccaaactacgcacagaagtttcagggcagagtcacgattaccgcggacgaatccacgagcacagcctacatggagctgagcagcctgagatctgaggacacggccgtttattactgtgcgagaggcccggaggtagcagtggctggtaatgggaactggttcgacccctggggccagggaaccctggtcaccgtctcctcag

SEQ ID NO: 10089 - DNA, 373 bp, Homo sapiens
caggtgcagctggtgcagtctggggctgaggtgaagaagcctgggtcctcggtgaaggtctcctgcaaggcttctggaggcaccttcagcagctatgctatcagctgggtgcgacaggcccctggacaagggcttgagtggatgggagggatcatccctatctttggtacagcaaactacgcacagaagttccagggcagagtcacgattaccgcggacgaatccacgagcacagcctacatggagctgagcagcctgagatctgaggacacggccgtgtattactgtgcgagagatcgggaaggacgatattttgactggctaaactggttcgacccctggggccagggaaccctggtcaccgtctcctcag

SEQ ID NO: 10090 - DNA, 373 bp, Homo sapiens
caggtgcaactggtggagtctgggggaggcgtggtccagcctgggaggtccctgagactctcctgtgcagcctctggactcaccttcagtagatatggcatgcactgggtccgccaggctccaggcaaggggctggagtgggtggcagttatatcatttgatggaagtgataaattctatgcagactccctgaagggccgattcaccatctccagagacaattccgagaacacgctgtatctgcaaatgaacagcctgagagctgaggacacggctgcgtattactgtgcgaaagggtcgtattacgatattttgactggtcattatggctttgactattggggccagggaaccctggtcaccgtctcctcag

SEQ ID NO: 10091 - DNA, 373 bp, Homo sapiens
caggtgcagctggtggagtctgggggaggcgtggtccagcctggggggtccctgagactctcctgtgcagcgtctggattcaccttcagtagctatggcatgcactgggtccgccaggctccaggcaaggggctggagtgggtggcatttatacggtttgatggaattaatatatactatctagactccgtgaagggccgattcaccatctccagagacaattccaagaacactctgtatctgcaaatgaacagcctgcgagctgaggacacggctgtgtattactgtgcgaatcaagtgccgtttaactatgatagtactgattattatcccccccactggggccagggaaccctggtcaccgtctcctcag

SEQ ID NO: 10092 - DNA, 373 bp, Homo sapiens
caggtgcaactggtggagtctgggggaggcgtggtccagcctgggaggtccctgagactctcctgtgcagcctctggattcattttcaggagctatggcatgcattgggtccgccaggctccaggcaaggggctggagtgggtggcagttatatcatatgatggaggtaataaatactatgcagactccgtgaagggccgattcaccatctccagagacaattccaagaacacgctgtatctgcaaatgaacagcctgagagctgaggacacggctgtgtattactgtgcgaaagaccgaacatatagtgcctacgatatggagtactactttgactactggggccagggaaccctggtcaccgtctcctcag

SEQ ID NO: 10093 - DNA, 373 bp, Homo sapiens
caggtgcagctggtggagtctgggggaggcgtggtccagcctgggaggtccctgagactctcctgtgcagcctctggattcaccttcagtaactatcctatgcactgggtccgccaggctccaggcaaggggctggagtgggtggcagttatatcatatgatggaagtgataaatactacgcagactccgtgaggggccgattcaccatctccagagacaattccaaaaacacgctgtatctgcaaatgaacagcctgagacctgatgacacggctgtatattactgtacggacgccgcgctgtggtatgatagtagtggttattacgactctgactactggggccagggaaccctggtcaccgtctcctcag

SEQ ID NO: 10094 - DNA, 355 bp, Homo sapiens
gaggtgcagctggtgcagtctggatcagaggtgaaaaagcccggggagtctctgaagatctcctgtaagggttctggatacagctttaccggctactggatcggctgggtgcgccagatgcccgggaaaggcctggagtggatggggatcatctatcctggtgactctaatactagatacaggccgtccttccaaggccaggtcaccatctcagccgacaagtccatcagcaccgcctatctgcagtggagcagcctgaaggtctcggacaccgccatgtattactgtgccgtaggggggggaggcagctgggttgactactggggccagggaaccctggtcaccgtctcctcag

SEQ ID NO: 10095 - DNA, 373 bp, Homo sapiens
caggtgcagctggtggagtctgggggaggcgtggtccagcctgggaggtccctcagactctcctgtgcagcctctggattcaccttcaggagctatggcatgcactgggtccgccaggctccaggcaaggggctggagtgggtggcacttatatcatatgatggaagtaataaatactatgcagaccccgtgaagggccgattcaccatctccagagacaattccaagaacacgctgtatctgcaaatgaacagcctgagagctgaggacacggctgtgtattactgtgcgaaagatccgagtgggttaaactggaacgacgacgagatcattgactactggggccagggaaccctggtcaccgtctcctcag

SEQ ID NO: 10096 - DNA, 373 bp, Homo sapiens
caggtccaactggtggagtctgggggaggcgtggtccagcctggggggtccctgagactctcctgtgcagcgtctggattcaccttcagtagctatggcatgcactgggtccgccaggctccaggcaaggggctggagtgggtgacatttatacattatgatggaagtaaaaaatattatgcagagtccgtgaagggccgattcaccatctccagagacaattccaagaacacgctgtatctgcaaatgaacagcctgagagctgaggacacggctgtgtattattgtgtctggttggggtctagtagtggttatatccggtgggggtactttgactactggggccagggaaccctggtcaccgtctcctcag

SEQ ID NO: 10097 - DNA, 373 bp, Homo sapiens
caggtgcagctggtggagtctgggggaggcgtggtccagcctgggaggtccctgagactctcctgtgcagcctctggattcaccttctctacctctgctatgcactgggtccgccaggctccaggcaaggggctggagtgggtggcagtgatatcatttgatggaaataataaattttatgcagactccgtgaagggccgattcaccatctccagagacaattccaagaacacgctgtatgtgcaggtgaacagcctgagacctgaagacacgggcgtgtattactgtgcgagcgctcgatataacaatgactgggacttgggtgaatacctccagcactggggccggggcaccctggtcatcgtctcctcag

SEQ ID NO: 10098 - DNA, 373 bp, Homo sapiens
gaggtgcagctggtggagtctgggggaggcctggtcaagcctggggggtccctgagactctcctgtgcagcctctggattcaccttcagtagctatagcatgaactgggtccgccaggctccagggaaggggctggagtgggtctcatccattagtagtagtagtagttacatatactacgcagactcagtgaagggccgattcaccatctccagagacaacgccaagaactcactgtatctgcaaatgaacagcctgagagccgaggacacggctgtgtattactgtgcgagagatgcctggagtgggagctacagtaccgatgaatacttccagcactggggccagggcaccctggtcaccgtctcctcag

SEQ ID NO: 10099 - DNA, 352 bp, Homo sapiens
gaggtgcagctggtggagtctggaggaggcttgatccagcctggggggtccctgagactctcctgtgcagcctctggattcaccgtcagtagcaactacatgttctgggtccgccaggctccagggaaggggctggagtgggtctcagttatttatagcggtggtagcacatactacacagactccgtgaagggccgattcaccatctccagagacaattccaagaacacagtgtatcttcaaatgaacagcctgagagccgaggacacgggcgtgtattactgtgcgagagggggagtgattacctcttcgggactactgggccagggtaccctggtcaccgtctcctcag

SEQ ID NO: 10100 - DNA, 372 bp, Homo sapiens
aggtgcagctggtggagtctgggggaggcttggtccagcctggagggtccctgagactctcctgtgcagcctctggattcatcttcagtgactactacatgagctggatccgccaggctccagggaaggggctggagtgggtttcatacattagtagtagtagtagttacacaaactacgcagactctgtgaagggccgattcaccatctccagagacaattccaagaacacgctgtatcttcaaatgaacagcctgagagttgaggacacggctgtgtattactgtgcgaagaagagttatagtggctacgtggctgatactgaatacttccagcactggggccagggcaccctggtcaccgtctcctcag

SEQ ID NO: 10101 - DNA, 396 bp, Homo sapiens
gaggtgcagctgttggagtctgggggaggcttggtacagcggggggggtccctgagactctcctgtgcagcctctggattcacctttagccgctatgccatgagctgggtccgccaggctccagggaaggggctggagtgggtctcaggtattagtgggagtgatggtagcacatactacgcagactccgtgaagggccggttcaccatctccagagacaattccaagaacacgctgtatctgcaaatgaacagcctgagagccgaggacacggccatatattactgtgcgaaagatcttttcggaccccacccgaggaggtatagcagcttagctgactactacaactacggtatggacgtctggggccaagggaccacggtcaccgtctcctca

SEQ ID NO: 10102 - DNA, 398 bp, Homo sapiens
cagctgcagctgcaggagtccggctcaggactggtgaagccttcacagaccctgtccctcacctgcgctgtctctggtggctccatcagcagtggtgattactcctggagctggatccggcagccaccagggaagggcctggagtggattgggtccatctatcatagtgggagcacctactacaacccgtccctcaagagtcgagtcaccatatcagtagacaggtccaagaaccagttctccctgaagctgagctctgtgaccgccgcggacacggccgtgtatcactgtgccgaaaaactgcatattgtggtggtgactgctattccaaccccgactggcggactacaactggttcgacccctggggccagggaaccctggtcaccgtctcctcag

SEQ ID NO: 10103 - DNA, 396 bp, Homo sapiens
caggtgcagctggtggagtctgggggaggcgtggtccagcctgggaggtccctgagactctcctgtgcagcctctggattcaccttcagtagctatggcatgcactgggtccgccaggctccaggcaaggggctggagtgggtggcacttatatcatatgatggaagtaataaatactctgcagactccgtgaagggccgattcaccatctccagagacaattcgaagaacacgctgtatctccaaatgaacagcctgacagatgaggacacggctgtgtattactgtgcgagagatgacgatcgggacggcctctatggttcggggagttatttatcatactacttcttcgctatggacgtctggggcccagggaccacggtcaccgtctcctca

SEQ ID NO: 10104 - DNA, 397 bp, Homo sapiens
gaggtgcagctggtgcagtctggagcagaggtgaaaaagcccggggagtctctgaagatctcctgtaagggttctggatacagctttaccagctactggatcggctgggtgcgccagatgcccgggaaaggcctggagtggatggggatcatctatcctggtgactctgataccagatacagcccgtccttccaaggccaggtcaccatctcagccgacaagtccatcagcaccgcctacctgcagtggagcagcctgaaggcctcggacaccgccatgtattactgtgcgagactcacctttcctagactaggatattgtagtagtaccagctgctataacccttccaactggttcgacccctggggccagggaaccctggtcaccgtctcctcag

SEQ ID NO: 10105 - DNA, 367 bp, Homo sapiens
caggtgcagctggtacagtctggggctgaggtgaagaagcctgggtcctcggtgagggtctcctgcaaggcttctggaggcaccttcggcaactatactatcaactgggtgcgacagccccctggacaagggcttcagtgggtgggagggatcacccctttccttggtacaacgagtaatgcacagaagttccagggcagagtcacgattaccgcggacgaatccacgagcacagcctgcatggaactgagaagcctgagatctgaggacacggccttatatttctgtgcgggagaaattgcagtgactacgtggactaactggttcgacccctggggccaggggaccctggtctccgtctcctcag

SEQ ID NO: 10106 - DNA, 361 bp, Homo sapiens
caggtgcagctgcaggagtcgggcccaggactggtgaagccttcggagaccctgtccctcacctgcactgtctctgattactccatcagcagtgcttactactggggttggatccggcagcccccagggaaggggctggagtggattgggagtatctttcatagtgggagcacctactacaacccgtccctcaagagtcgagtcaccatatcagtagacacgtccaagaaccagttctccctgaagctgagctctgtgaccgccgcagacacggccgtgtattactgtgcgagagttggttcggggagttattatacccctgactactggggccagggaaccctggtcaccgtctcctcag

SEQ ID NO: 10107 - DNA, 376 bp, Homo sapiens
cagctgcagctgcaggagtcgggcccaggactggtgaagccttcggagaccctgtccctcacctgcactgtctctggtggctccatcagcagtagtagttactactggggctggatccgccagcccccagggaaggggctggagtggattgggagtatctattatagtgggagcacctactacaacccgtccctcaagagtcgagtcaccatatccgtagacacgtccaagaaccagttctccctgaagctgagctctgtgaccgccgcagacacggctgtgtattactgtgcgagacatggagcagcagctggtactaggggatatgatgcttttgatatctggggccaagggacaatggtcaccgtctcttcag

SEQ ID NO: 10108 - DNA, 376 bp, Homo sapiens
cagctgcagctgcaggagtcgggcccaggactggtgaagccttcggagaccctgtccctcacctgcactgtgtctggtggctccatcagcagtagtagttattactggggctggatccgccagcccccagggaaggggctggagtggattgggagtatctattatagtgggagcacctacttcaacccgaccctcaagagtcgagtcaccatatccgtcgacacgtccaagaaccagttctccctgaagctgagttctgtgaccgccgcagacacggctgtgtattactgtgcgggagaaatggccacaaagaccgacctctcgggatttgcttttgatatctggggccaagggacagtggtcaccgtctcttcag

SEQ ID NO: 10109 - DNA, 361 bp, Homo sapiens
gaagtgcaactggtggaatctgggggagtcgtggtgcagcctggggggtccctgagactctcctgtgccgcctctggattcatatttgaagattatagcatgcactgggtccgtcaagccccggggaagggtctggagtgggtctctcttattaattgggagggtgataccacatactatgcagactctgtgaggggccgattcaccatctccagagacaacagcaaaaactccctttatctgcaaatggacagtctgaaaattgaggacaccgccttgtattactgtgtaaaaccggtgtttaaaactctccactcactcgacaactggggccagggaaccctggtcaccgtctcctcag

SEQ ID NO: 10110 - DNA, 358 bp, Homo sapiens
caggtgcagctacagcagtggggcgcaggactgttgaagccttcggagaccctgtccctcacctgcgctgtctatggtgggtccttcagtaattactactggagctggatccgccagcccccagggaaggggctggagtggattggggaagtcaatcatagtggaagcaccaactccaacccgtccctcatgagtcgagtcaccatgtcagtagacacgtccaagaaccagttgtccctgaagctgagctctgtgaccgccgcggacacggctctatattactgtgcgagaggctgggacagctatggttacaaatttgactactggggccagggaaccctggtcaccgtctcctcag

SEQ ID NO: 10111 - DNA, 361 bp, Homo sapiens
caggtgcagctggtgcagtctggggctgaggtgaagaagcctggggcctcagtgaaggtctcctgcaaggcttctggatacaccttcaccggctactatatgcactgggtgcgacaggcccctggacaagggcttgagtggatgggatggatcaaccctaacagtggtggcacaaactatgcacagaagtttcagggcagggtcaccatgaccagggacacgtccatcagcacagcctacatggagctgagcaggctgagatctgacgacacggccgtgtattactgtgcgagaaccggagggagcccgggtgatgcttttgatatctggggccaagggacaatggtcaccgtctcttcag

SEQ ID NO: 10112 - DNA, 364 bp, Homo sapiens
caggtcaccttgaaggagtctggtcctgtgctggtgaaacccacagagaccctcacgctgacctgcaccgtctctgggttctcactcagcaatgctaaaatgggtgtgagctggatccgtcagccccccgggaaggccctggagtggcttgcacacattttttcgaatgacgaaaaatcctacagcacatctctgaagagtagactcaccatctccaaggacacctccaaaagccaggtggtctttaccatgaccaacatggaccgtgtggacacagccacatattactgtgcacggattaactggttcgtgggtgatgctcttgatatctggggccaagggacaatggtcaccgtctcttcag

SEQ ID NO: 10113 - DNA, 361 bp, Homo sapiens
caggtgcagctggtggagtctgggggaggcgtggtccagcctgggaggtccctgagactctcctgtgcagcgtctggattcaccttcagtagttatggcatacactgggtccgccaggctccaggcaaggggctggagtgggtggcagttatatggtatgatggaagtaatgaatactatgcagactccgtgaagggccgattcaccatctccagagacaattccaagaacacggtgaatctgcaaatgaacagcctgagagccgaggacacggctgtgtattactgtgcgagagatgggggattcagttttggtgaccttgactactggggccagggaatccgggtcaccgtctcctcag

SEQ ID NO: 10114 - DNA, 361 bp, Homo sapiens
caggtgcagctggtggagtctgggggaggcgtggtccagcctgggaggtccctgagactctcctgtgcagcgtctggattcaccttcagtagctatggcatgcactgggtccgccaggctccaggcaaggggctggagtgggtggcagttatatggtatgatggaagtaataaacactatgcagactccgtgaagggccgattcaccatctccagagacaattccaagaacacgctgtatctgcaaatgaacagcctgagagccgaggacacggctgtctattactgtgcgagagatgacggagagatggctacccattttgactactggggccagggaaccctggtcaccgtctcctcag

SEQ ID NO: 10115 - DNA, 367 bp, Homo sapiens
caggttcacctggtgcagtctggagttgaggtgaagaagcctggggcctcagtgaaggtctcctgcaaggcttctggttacacctttaccagccacggtatcagctgggtgcgacaggcccctggacaagggcttgagtggatgggatggatcagcgcttacaatggtaacacaaaatttgcacagaaattccagggcagagtcaccatgaccacagacacatccacgagcacagcctacatggacctgaggagcctgagatctgacgacacggccgtgtattactgtgcgagagattctttagcagtgactggccttaacaggttcgacccctggggccagggaaccctggtcaccgtctcctcag

SEQ ID NO: 10116 - DNA, 367 bp, Homo sapiens
caggtgcagctggtgcagtctggggctgaggtgaagaagcctgggtcctcggtgaaggtctcctgcaaggcttctggaggcaccttcagcagctatgctatcagctgggtgcgacaggcccctggacaagggcttgagtggatgggagggatcatccctatctttggtacagcaaactacgcacagaagttccagggcagagtcacgattaccgcggacgaatccacgagcacagcctacatggagctgagcagcctgagatctgaggacacggccgtgtattactgtgcgagaaattactatgatagtagtggttatccggctttggactactggggccagggaaccctggtcaccgtctcctcag

SEQ ID NO: 10117 - DNA, 361 bp, Homo sapiens
gaggtgcagttggtgcagtctggagcagaggtgaaaaagcccggggagtctctgaagatctcctgtaagggttctggatacagctttatcagctactggatcgcctgggtgcgccagatgcccgggaaaggcctggagtggatggggatcatctatcctggtgactctgataccagatacagcccgtccttccaaggccaggtcaccatctcagccgacaagtccatcagcaccgcctacctgcagtggaacagcctgaaggcctcagacaccgccatgtattactgtgcgagcccaattttgggtatccctttggcttttgatatctggggccaagggacaatggtcaccgtctcttcag

SEQ ID NO: 10118 - DNA, 361 bp, Homo sapiens
caggtgcagctggtgcagtctggggctgaggtgaagaagcctggggcctcagtgaaggtttcctgcaaggcatctggatacaccttcaccagctactatatgcactgggtgcgacaggcccctggacaagggcttgagtggatgggaataatcaaccctagtggtggtagcacaagctacgcacagaagttccagggcagagtcaccatgaccagggacacgtccacgagcacagtctacatggagctgagcagcctgagatctgaggacacggccgtgtattactgtgcgagagtaagatccagtccgcgagaagcttttgatatctggggccaagggacaatggtcaccgtctcttcag

SEQ ID NO: 10119 - DNA, 361 bp, Homo sapiens
gaggtgcagctggtggagtccgggggaggcttagttcagcctggggggtccctgagactctcctgtgcagcctctagattcaccttcagtagtttctggatgcactgggtccgccaagctccagggaaggggctggtgtgggtctcacgtattaatagtgatgggagtagcacaagctacgcggactccgtgaagggccgattcaccatctccagagacaacgccaagaacacgctgtatctgcaaatgaacagtctgagagccgaggacacggctgtgtattactgtgcaagagaagttggtggggcaggctgggcttttgatatctggggccaagggacaatggtcaccgtctcttcag

SEQ ID NO: 10120 - DNA, 364 bp, Homo sapiens
cagctgcagctgcaggagtcgggcccaggactggtgaagccttcggagaccctgtccctcacctgcactgtctctggtggctccatcagcagtagtagtttctactgggactggatccgccagcccccagggaaggggctggagtggattgggagtattttttatagtgggattgcctactacaacccgtccctcaagagtcgagtcaccatatccgtagacacgtccaggaaccgcttctccctgaggctgagctctgtgaccgccgcagacacggctgtgtatttctgtgcgagacgacgcagtagcaataacgatgcttttgatatctggggccaagggacaatggtcaccgtctcttcag

SEQ ID NO: 10121 - DNA, 364 bp, Homo sapiens
cagctgcagctgcaggagtcgggcccaggactggtgaagccttcggagaccctgtccctcacctgcactgtctctggtggctccatcagcagtactagttactactggggctggatccgccagcccccagggaagggactggagtggattgggagtatcttttatagtgggagcacctactacaacccgtccctcaagagtcgagtcaccatatccgtagacacgtccaagaaccagttctccctgaaactgagctctgtgaccgccgcagacacggctgtgtattactgtacgagacgacgcattagcaataacgatgcttttgatatctggggccaagggacagtggtcaccgtctcttcag

SEQ ID NO: 10122 - DNA, 364 bp, Homo sapiens
cagctgcagctgcaggagtcgggcccaggactggtgaagccttcggagaccctgtccctcacctgcactgtctctggtggctccatcaccagtactaattactggtgggactggatccgccagcccccagggaagggactggagtggattgggactatcttttatagtgggatcacctactgcaacccgtccctcaagagtcgagtcaccatatccgtagacacgtccaagaaccagttctccctgaaactgagctctgtgaccgccgcagacacggctgtctattactgtacgagacgacgcagtagtaatgacgatgcttttgaaaactggggccaagggacagtggtcaccgtctcttcag

SEQ ID NO: 10123 - DNA, 361 bp, Homo sapiens
caggtccagctggtacagtctggggctgaggtgaagaagcctggggcctcagtgaaggtctcctgcaagatgtccggatacaccctcactgaattatccattcactgggtgcgacagggtcctggaaaagggcttgagtggatgggaggttttgatcctgaaaagggtaaaacaatctacgcacagaaattccagggcagagtcaccatgaccgaggacacatcaacagacacagcctacatggaactgaactacctgagatctgaggacacggccgtgtatttctgtgcaaccgggcaccagctgttggtctcctggttcgacccctggggccagggaaccctggtcaccgtctcctcag

SEQ ID NO: 10124 - DNA, 361 bp, Homo sapiens
caggtccagctggtacagtctggggctgaggtgaagaagcctggggcctcagtgaaggtctcctgcaaggtttccggattcaccctcactgaattacccatccactgggtgcgacaggctcctggaaaagggcttgagtggatgggaggttttgatcctgaagatgctgaaacaatctacgcacagaaattccagggcagagtcaccatgaccgaggacacatctacagacacagcctacatggaactgaccagcctgagatctgacgacacggccgtgtattattgtgcaacagggggccagttgcttccggggtggttcgacccctggggccagggaaccctggtcaccgtctcctcag

SEQ ID NO: 10125 - DNA, 361 bp, Homo sapiens
caggtccagctggtacagtctggggctgaggtgaagaagcctggggcctcagtgaaggtctcctgcaaggtttccggatacaccctcactgaattatccatggactgggtgcgacaggctcctggaaaagggcttgagtggatgggaggttttgatcctgaagatggtgaaacaatctacgcacagaagttccagggcagagtcaccatgaccgaggacacatctacagacacagcctacatggagctgagcagcctgagatctgaggacacggccgtgtattactgtgcaacaggtagtccatacagccgcacctggttcgacccctggggccagggaaccctggtcaccgtctcctcag

SEQ ID NO: 10126 - DNA, 361 bp, Homo sapiens
caggtccagctggtacagtctggggctgaggtgaagaagcctggggcctcagtgaaggtctcctgcaagctttccggatacaccctcactgaattatccatccactgggtgcgacaggctcctggaaaagggcttgagtggatgggaggttttgatcctgcagaagctgaaacattctacgcacagaagttccagggcagagtcaccatgaccgaggacacatctacagacacagcttacatggagctgcgcagcctgagatctgaggacacggccgtgtattactgtgcaaccgggcaccagatgttggtctcctggtttgccccctggggccagggaaccctggtcaccgtctcctcag

SEQ ID NO: 10127 - DNA, 367 bp, Homo sapiens
caggtgcagctggtgcagtctggggctgaggtgaagaagcctgggtcctcggtgaaggtctcctgcaaggcttctggaggcaccttcagcagctatgctatcagctgggtgcgacaggcccctggacaagggcttgagtggatgggagggatcatccctatctttggtacagcaaactacgcacagaagttccagggcagagtcacgattaccgcggacgaatccacgagcacagcctacatggagctgagcagcctgagatctgaggacacggccgtgtattactgtgcgagaccccgagcaagctggttattatatggggcttttgactactggggccagggaaccctggtcaccgtctcctcag

SEQ ID NO: 10128 - DNA, 397 bp, Homo sapiens
gaggtgcagctggtggagtctgggggaggcttggtccagcctggggggtccctgagactctcctgtgcagcctctggattcaggttcagtgattatgccatgagctgggtccgccaggctccagggaaggggctggagtgggtctcagccattagtggtagtggtagtagtacatattacgcagactccgtgaagggccggttcaccatctccagagacaattccaagaacacactgtatctacaaatgaacagcctgagagccgaggacacggccctatattactgtgcgaaagattcctattgttttagtagcagctgctattctatggatccagaaaaatggtacaactggttggacccctggggccagggaacccttgtcaccgtctcctcag

SEQ ID NO: 10129 - DNA, 397 bp, Homo sapiens
gaggtgcagctgtcggagtctgggggaggcttggtacagcctggggggtccctgagactctcctgtgcagcctctggattcatctttaccaactatgccttgacttgggtccgccaggctccaggaagggggttggagtgggtctcaagtatcagtagtagcgctggtagaacattctacgcagactccgtgaagggccggttcaccatctccagagacaattccaagaacactctgtatctgcaaatgaacagcctgagagccgacgacacggccgtatattactgtgcgaaagattcctattgttttagtaccacctgcaattcattggaaccagaacagtggttcaactggttcgacccctggggccagggaaccctggtcaccgtctcctcag

SEQ ID NO: 10130 - DNA, 364 bp, Homo sapiens
caggtcaccttgagggagtctggtcctgcgctggtgaaacccacacagaccctcacactgacctgcaccttctctgggttctcactcagcactagtggaatgtgtgtgagctggatccgtcagcccccagggaaggccctggagtggcttgcactcattgattgggatgatgataaatactacagcacatctctgaagaccaggctcaccatctccaaggacacctccaaaaaccaggtggtccttacaatgaccaacatggaccctgtggacacagccacgtattactgtgcacggtccggggagactactttgaatgcttttgatatctggggccaagggacaatggtcaccgtctcttcag

SEQ ID NO: 10131 - DNA, 364 bp, Homo sapiens
cagatcaccttgaaggagtctggtcctacgctggtgaaacccacacagaccctcacgctgacctgcgccttctctgggttctcactcagcactaatggagtgggtgtgggctggctccgtcagcccccaggaaaggccctggagtggcttgcactcatttattgggatgatgataaacgctacaccccatctctgaagagcaggctcaccatcaccaaggacccctccaaaaaccaggtggtccttacaatgaccaacatggaccctgtggacacagccacatattactgtgcacacggcctagtgggaattactttgctttttgactactggggccagggaaccctggtcaccgtctcctcag

SEQ ID NO: 10132 - DNA, 358 bp, Homo sapiens
caggtgcagctacagcagtggggcgcaggactgttgaagccttcggagaccctgtccctcacctgcgctgtctatggtgggtccttcagtggttactactggagctggatccgccagcccccagggaaggggctggagtggattggggaaatcaatcatagtggaagcaccaactacaacccgtccctcaagagtcgagtcaccatatcagtagacacgtccaagaaccagttctccctgaagctgagctctgtgaccgccgcggacacggctgtgtattactgtgcgagagcatatagcagccaccacaactggttcgacccctggggccagggaaccctggtcaccgtctcctcag

SEQ ID NO: 10133 - DNA, 361 bp, Homo sapiens
gaagtgcagctggtggagtctgggggaggcttggtacagcctggcaggtccctgagactctcctgtgcagcctctggattcacctttgatgattatgccatgcactgggtccggcaagctccagggaagggcctggagtgggtctcaggtattagttggaatagtggtagcataggctatgcggactctgtgaagggccgattcaccatctccagagacaacgccaagaactccctgtatctgcaaatgaacagtctgagagctgaggacacggccttgtattactgtgcaaaagggagggactacggtgactaccgactcgactactggggccagggaaccctggtcaccgtctcctcag

SEQ ID NO: 10134 - DNA, 358 bp, Homo sapiens
gaggtgcagctggtggagtctggaggaggcttgacccagccgggggggtccctgagactctcctgtgcagcctctgggttctccgtcagtggaaactgcgtaagctgggtccgacagggcccagggaaggggctggagtgggtctcagtcatctatggtggtggaaacacagactacgcagactccgtgaagggccgattctccatctccagagacaaatccaggaacacggtgtatcttcaattgagcagtctgagcgtcgaggacacggccgtctattactgtgcgagagatagtagtggtaattactacggatttgacaagtggggccagggaaccctggtcaccgtctccgcag

SEQ ID NO: 10135 - DNA, 358 bp, Homo sapiens
gaggtgcagctggtggattctggaggaggcttgatccagcctggggggtccctgagactctcctgtgcagcctctgggttcaccgtcagtagcaactgcatgagctgggtccgccaggctccagggaaggggctggagtgggtctcagttatttatagcggtggtagcacatactacgcagactccgtgaagggccgattcaccatctccagagacaattccaagaacacggtgtatcttcagatgaacagcctgagagccgaggacaccgccgtctattactgtgcgagggggcctcgttgtgggagccatccctttgactactggggccagggaaccctggtcaccgtctcctcag

SEQ ID NO: 10136 - DNA, 358 bp, Homo sapiens
gaggtgcagctggtggagtctggaggaggcttgatccagcctggggggtctctgagagtcgcctgtgcagcctctgggttcaccgtcagtagcaactacatgagctgggtccgccaggctccagggaaggggctggattgggtctctactatttatagcggtggttccacattctacgcagacgccgtgaagggccgattcaccatctccagagacaattccaagaacacactgtatcttcaaatgaacagcctgagagccgaagacacggccgtgtattactgtgcgagaattacttatgattacttatggggagacacctcctggggccagggaaccctggtcaccgtctcctcag

SEQ ID NO: 10137 - DNA, 364 bp, Homo sapiens
caggtgcagctgcaggagtcgggcccaggactggtgaagccttcggagaccctgtccctcacctgcactgtctctggtggctccgtcagcagtggtagttactactggagctggatccggcagcccccagggaagggactggagtggattgggtatatctattacagtgggagcaccaactacaacccctccctcaagagtcgagtcaccatatcagtagacacgtccaagaaccagttctccctgaagctgagctctgtgaccgctgcggacacggccgtgtattactgtgcgagagggggagcagcagctgataactggttcgacccctggggccagggaaccctggtcaccgtctcctcag

SEQ ID NO: 10138 - DNA, 367 bp, Homo sapiens
gaagtgcagctggtggagtctgggggaggcttggtacagcctggcaggtccctgagactctcctgtgcagcctctggattcacctttgatgattatgccatgcactgggtccggcaagctccagggaagggcctggagtgggtctcaggtagtagttggaatagtggtaccataggctatgcggactctgtgaagggccgattcaccatctccagagacaacgccaagaactccctgtatctgcagatgaacagtctgagagctgaggacacggccttgtatttttgtgcaaaagataatatacgtttgggggagttatatgcttttgatgtctggggccaagggacaatggtcaccgtctcttcag

SEQ ID NO: 10139 - DNA, 364 bp, Homo sapiens
caggtgcagctgcaggagtcgggcccaggactggtgaagccttcggagaccctgtccctcacctgcactgtctctggtggctccgtcagcagtggtagttactactggagctggatccggcagcccccagggaagggactggagtggattgggtatatctattacagtgggagcaccaactacaacccctccctcaagagtcgagtcaccatatcagtagacacgtccaagaaccagttctccctgaagctgagctctgtgaccgctgcggacacggccgtgtattactgtgcgagaggggggctatggttctccggctggttcgacccctggggccagggaaccctggtcaccgtctcctcag

SEQ ID NO: 10140 - DNA, 361 bp, Homo sapiens
gaggtgcagttattggagtctgggggaggcttggtccagccgggggggtccctgagactctcttgtgcagcctctggattcacctatagtagctatgccatgagttgggtccgccaggctccagggaaggggctggagtgggtctcaggtattagtggaagtggtggtaggaaatactacgcagactccgtgaagggccggttcaccatctccagagacaattccaagaacacgctgtatgtgcaaatgagtggcctgagagtcgaggactcggccatatattactgtgcgctgtgctccggagctggaactacttcccctaattactggggccagggaaccctggtcaccgtctcctcag

SEQ ID NO: 10141 - DNA, 361 bp, Homo sapiens
gaggtgcagctgttggagtctgggggaggcttggtacagcctggggggtccctgagactctcctgtgcagcctctggattcacctttagcagctatgccatgagctgggtccgccaggctccagggaaggggctggagtgggtctcagctattagtggtagtggtggtagcacatactacgcagactccgtgaagggccggttcaccatctccagagacaattccaagaacacgctgtatctgcaaatgaacagcctgagagccgaggacacggccgtatattactgtgcgaaaggggctagaataagctgggaccgctttgactactggggccagggaaccctggtcaccgtctcctcag

SEQ ID NO: 10142 - DNA, 379 bp, Homo sapiens
gaggtgcagctgttggagtctgggggaggctcggtacagcctggggggtccctgagactctcctgtgcagcctctggattcacctttagcaactatgccatgacctgggtccgccaggctccagggaaggggctggagtgggtctcaggtattagtggtagtggtggttacacatatcacgaagactccacatattatgaagactccgtgaagggccggttctccatctccagagacattaccaagaacatgctgtttctgcaaatgaacagcctgagagccgacgacacggccgtttattactgtgcactctccagtgggaggcatcccgggggggctaactactggggccagggagccctggtcaccgtctcctcag

SEQ ID NO: 10143 - DNA, 361 bp, Homo sapiens
gaggtgcagctgttggagtctgggggaggcttggtacagcctggggggtccctgagactctcctgtggagcctctggattcacctttagcagctatgccatgagctgggtccgccaggctccagggaaggggctggagtgggtctcagctattagtggtactggtggtagcacatactacgcagactccgtgaagggccggttcaccatctccagagacaattccaagaacacgctgtatctgctaatgaacagcctgagaaccgaggacacggccgtatattactgtgcgaaagatttctttttcacagctatgctttttgagtactggggccagggaaccctggtcaccgtctcctcag

SEQ ID NO: 10144 - DNA, 364 bp, Homo sapiens
cagctgcagctgcaggagtcgggcccaggactggtgaagccttcggagaccctgtccctcacctgcactgtctctggtggctccatcagcagtagtgattactactggggctggatccgccagcccccagggaaggggctggagtggattgggagtttctattatagtgagaacacctactacaatccgtccctcaagagtcgagtcaccatatccgtagacacgtccaagaagcagttctccctgaaactgagctctgtgaccgccgcagacacggctgtgtattactgtgcgagccgatatagcagcaggttgtactaccttgactactggggccagggaaccctggtcaccgtctcctcag

SEQ ID NO: 10145 - DNA, 364 bp, Homo sapiens
cagctgcagctgcaggagtcgggcccaggactggtgaagccttcggagaccctgtccctcacctgcactgtctctggtggctccatcagcagtagtagttactactggggctggatccgccagcccccagggaaggggctggagtggattgggagtatctattatagtgggagcacctactacaacccgtccctcaagagtcgagtcaccatatccgtagacacgtccaagaaccagttctccctgaagctgagctctgtgaccgccgcagacacggctgtgtattactgtgcgagactcgggcaactatggttcggggaatggggggtctggggccagggaaccctggtcaccgtctcctcag

SEQ ID NO: 10146 - DNA, 364 bp, Homo sapiens
cagctgcagttgcgggagtcgggcccaggattggtgaagccttcggagaccctgtccctcacctgcagtgtctctgggggcggcatcggtagtaacgttcactattggggctggatccgccagcccccagggaaggggctggagtggattgggaatatttattatactgggagcgcctaccagaacccgtccctcaagagtcgaatcaccatgtccgtggacgcgtccaagaatcagttctccctgagactgacctcagtgaccgccgcagacacgggtgtgtattactgtgcgaggcgaatagttgttcggccctaccactttgaccactggggccagggagcccaggtcatcgtctcctcag

SEQ ID NO: 10147 - DNA, 364 bp, Homo sapiens
cagctgcagctgcaggagtcgggcccaggactggtgaagccttcggagaccctgtccctcacctgcactgtctctggtggctccatcagcagtagtagttactactggggctggatccgccagcccccagggaaggggctggagtggattgggagtatctattatagtgggagcacctactacaacccgtccctcaagagtcgagtcaccatatccgtagacacgtccaagaaccagttctccctgaagctgagctctgtgaccgccgcagacacggctgtgtattactgtgcgagacacgatactaataccgtcggctactttgactactggggccagggaaccctggtcaccgtctcctcag

SEQ ID NO: 10148 - DNA, 358 bp, Homo sapiens
caggtgcagctgcaggagtcgggcccaggactggtgaagccttcggagaccctgtccctcacctgcactgtctctggtggctccatcagtagttactactggagctggatccggcagcccccagggaagggactggagtggattgggtatatctattacagtgggagcaccaactacaacccctccctcaagagtcgagtcaccatatcagtagacacgtccaagaaccagttctccctgaagctgagctctgtgaccgctgcggacacggccgtgtattactgtgcgagaggggcagtggctggtaaggagttttctgactactggggccagggaaccctggtcaccgtctcctcag

SEQ ID NO: 10149 - DNA, 367 bp, Homo sapiens
gaagtgcagctggtggagtctgggggaggcttggtacagcctggcaggtccctgagactctcctgtgcagcctctggattcacctttgaggattatgccatgcactgggtccggcaagctccagggaagggcctggagtgggtctcaggtattagttggaatggtggtatcatagactatgcggactctgtgaagggccgattcaccatctccagagacaacgccaagaactccctgtatctgcaaatgatccgtctgagagctgaggacacggccttgtattactgtgcaaaagaccttggctacggtgactacgaagatgctcttgatatctggggccaagggacaatggtcaccgtctcttcag

SEQ ID NO: 10150 - DNA, 358 bp, Homo sapiens
caggtgcagctgcaggagtcgggcccaggactggtgaagccttcggagaccctgtccctcacctgcactgtctctggtgcctccatcagtagttactactggagctggatccggcagcccccagggaaaggactggagtggattgggtatatcggtgatagtggaagcaccaactacaagccctccctcaagagtcgagtcaccatatcagtagacacgcccaagaaccagttctccctgaagctgacctctgtgaccgctgcggacacggccatgtattactgtgcgagagagcgggaacctaacaactctggcattgactactggggccagggaaccctggtcaccgtctcctcag

SEQ ID NO: 10151 - DNA, 361 bp, Homo sapiens
caggtgcagctggtggagtctgggggaggcgtggtccagcctggggggtccctgagactctcctgtgcagcgtctggattcagcttcagtagctatggcatgcactgggtccgccaggctccaggcaaggggctggagtgggtggcatttatacggtatgatggaaataaaaaaaactatgcagactccgtgaagggccgattctccatctccagagacaattccaagaacacgctgtatctgcaaatgaacagcctgagagctgaggacacggctgtgtattactgtgcgaaagattggaatggagatggcagcaattggtcctactggggccagggaaccctggtcaccgtctcctcag

SEQ ID NO: 10152 - DNA, 361 bp, Homo sapiens
caggtgcagctggtggagtctgggggaggcgtggtccagcctgggaggtccctgagactctcctgtgcagcctctggattcaccttcaggaactatggcatgcactgggtccgccaggctccaggcaaggggctggagtgggtggcggttatatcatatgatggaagtaaggaatactatgcagactccgtgaagggccgattcaccatctccagagacaattccaagaacacgctgtttctgcaaatgaacagcctgagagctgaggacacggctgtgtattactgtgcgaaagattatggcttctcttacgcgggcgaggactactggggccagggaaccctggtcaccgtctcctcag

SEQ ID NO: 10153 - DNA, 361 bp, Homo sapiens
caggtgcagctggtggagtctgggggaggcgtggtccagcctgggaggtccctgagactctcctgtgcagcctctggattcatcttcagtagccatgctatgcactgggtccgccaggctcctggcagggggctggagtgggtggcagttatatcatatgatggaaataatgaatactacgcagactccgtgaagggccgattcaccatctccagagacaattccaagagcacgctgtatgtgcaaatgcacagcctgagagctgaggacacggctgtgtattactgtgcgagaggcttcggtggctactttaccgcatttgccttctggggccagggaaccctggtcaccgtctcctcag

SEQ ID NO: 10154 - DNA, 361 bp, Homo sapiens
caggtgcagctggtggagtctgggggaggcgtggtccagcctgggaggtccctgagactctcctgtgcagcctctggattcaccttcagtagctatggcatgcactgggtccgccaggctccaggcaaggggctggagtgggtggcagttatatcatatgatggaagtaataaatactatgcagactccgtgaagggccgattcaccatctccagagacaattccaagaacacgctgtatctgcaaatgaacagcctgagagctgaggacacggctgtgtattactgtgcgaaaggctcatggtttggggagttcccaacggggtactggggccagggaaccctggtcaccgtctcctcag

SEQ ID NO: 10155 - DNA, 361 bp, Homo sapiens
caggtgcagctggtggagtctgggggaggcgtggtccagcctgggaggtccctgagactctcctgtgcagcctctggattcaccttcagtagttatggcatgcactgggtccgccaggctccaggcaaggggctggagtgggtggcagtcatatcatatgatggaggtaataaatactacgcagactccgtgaagggccgattcaccatctccagagacaattccaagagcacgctatatctgcaaatgaacaggctgagagctgaggacacggctgtgtattactgtgcgaaagatccggtagcagtggctggtccccttgactactggggccagggaaccctggtcaccgtctcctcag

SEQ ID NO: 10156 - DNA, 357 bp, Homo sapiens
gaggtgcagctggtggagtctgggggagggttggtacagcctggggggtccctgagactctcctgtgcagcctctggattcaccttcagtagctacgacatgcactgggtccgccaaggtgtgggaaaacgtctggagtgggtctcagctattggtactgctggtgacccatactattcaggctccgtgaagggccgattcaccatctccagagaaaatgccaagaactccttgtatcttcaaatgaacagcctgagagccggggacacggctgtgtattactgtgcaagaggtcagagcagcagctactacggtatggacgtctggggccaagggaccacggtcaccgtctcctca

SEQ ID NO: 10157 - DNA, 361 bp, Homo sapiens
gaagtgcagttggtgcagtccggagcggaagtgaaaaagcccggggagtctctgaggatctcctgtaagggttctggatacagctttaccagttactggatcagctgggtgcgccagatgcccgggaaaggcctggagtggatgggaaggattgatcctagtgactcttataccaactacagcccgtccttccaaggccacgtcaccatctcagctgacaagtccgtcaacactgcctacctgcagtggagtagcctgaaggcctcggacaccgccatgtattactgtgcgaggggaggaggttatagcagaacctggttcgacccctggggccagggaaccctggtcaccgtctcctcag

SEQ ID NO: 10158 - DNA, 361 bp, Homo sapiens
gaggtgcagctggagcagtctggagcagaggtgaaaaagcccggggagtctctgaagatctcctgtaagggttctggatacagctttaccagctactggatcggctgggtgcgccagatgcccgggaaaggcctggagtggatggggatcatccatcctggtgactctgataccagatacagcccgtccttccaaggccaggtcaccttctcagccgacaagtccatcagcaccgcctacctgcagtggagcagcctgaaggcctcggacaccgccatgtattactgtgcgaggtatagtgggacctacaacggctggttcgacccctggggccagggaaccctggtcaccgtctcctcag

SEQ ID NO: 10159 - DNA, 361 bp, Homo sapiens
gaggtgcagctggtgcagtctggagcagaggtgaaaaagcccggggagtctctgaagatctcctgtaagggttctggatacagctttaccagctactggatcggctgggtgcgccagatgcccgggaaaggcctggagtggatggggatcatctatcctggtgactctgataccagatacagcccgtccttccaaggccaggtcaccatctcagccgacaagtccatcagcaccgcctacctgcagtggagcagcctgaaggcctcggacaccgccatgtattactgtgcgagaccgatggatacagcaatgaggggctttgactactggggccagggaaccctggtcaccgtctcctcag

SEQ ID NO: 10160 - DNA, 361 bp, Homo sapiens
gaggtgcagctggtgcagtctggagcagaggtgaaaaagcccggggagtctctgaagatctcctgtaagggttctggatacaggtttaccagctactggatcgcctgggtgcgccagatgcccgggaaaggcctggagtggatggggatcatctatcctggtgactctgataccagatacagcccgtcaatccaaggccaggtcaccatctcagccgacaagtccatcagcaccgcctatctgaagtggagcagcctgaaggcctcggacaccgccatgtattactgtgcgactagtagcggatatagtggctacgaatttcctttctggggccagggaaccctggtcaccgtctcctcag

SEQ ID NO: 10161 - DNA, 390 bp, Homo sapiens
gaggtgcagctggtggagtctgggggaggcttggtccagcctggggggtccctgagactctcctgtgcagcctctggattcacctttagtagctattggatgagctgggtccgccaggctccagggaaggggctggagtgggtggccaacataaagcaagatggaagtgagaaatactatgtggactctgtgaagggccgattcaccatctccagagacaacgccaagaactcactgtatctgcaaatgaacagcctgagagccgaggacacggccgtgtattactgtgcgagagagacgtattactatggtttggggagttattcgttgtcctactactactacggtatggacgtctggggccaagggaccacggtcaccgtctcctca

SEQ ID NO: 10162 - DNA, 361 bp, Homo sapiens
caggtgcagttggtggagtctgggggaggcgtggtccagcctgggaggtccctgagactctcctgtgcagcctctggattcaccttcagtagttatggcatgcagtgggtccgccaggctccaggcaagggactggagtgggtggcagttatatcatatgatggaagtaatacatactatgcagagtccgtgaagggccgattcaccatctccagagacaattccaagaacacgctgtatctgcaaatgaacagcctgagagccgaggacacggctgtgtattactgtgcgagagctagcagacttggctccgaatacttccagcactggggccagggcaccctggtcaccgtctcctcag

SEQ ID NO: 10163 - DNA, 390 bp, Homo sapiens
gaggtgcagctggtgcagtctggagcagaggtgaaaaagcccggggagtctctgaagatctcctgtaagggttctggatacagcttcaccaactactggatcggctgggtgcgccagatgcccgggaaaggcctggagtggatggggatcatctatcctggtgattctgataccagatacagtccgtccttccaaggccaggtcaccatctcagccgacaagtccatcagcaccgcctacctgcagtggagccgcctgaaggcctcggacaccgccatgtattactgtgcgagactccgcgcttattatgatagtagtgggttttaccccacttactaccactacgctatggacgtctggggccaagggaccacggtcaccgtctcctca

SEQ ID NO: 10164 - DNA, 390 bp, Homo sapiens
caggtgcagctggtgcagtctggggctgaggtgaagaagcctgggtcctcggtgaaggtctcctgcaaggcttctggaggcaccttcagcagctatggtattagctgggtgcgacaggcccctggacaagggcttgagtggatgggagggatcatccctatctttggtacaacaaaatacgcacagaagttccagggcagagtcacgattaccgcggacgaatccacgagcacagcctacatggagctgagcagcctgagatctgaggacacggccgtgtattactgtgcgagagctacaggggtatattgtactaatggtgtatgctcttactactactactacggtatggacgtctggggccaagggaccacggtcaccgtctcctca

SEQ ID NO: 10165 - DNA, 390 bp, Homo sapiens
caggtgctcctggtgcagtctggggctgaggtgaagatgcctgggtcctcggtgaaggtctcctgcaaggcttctggaggcaccttcagcagctatactatcggctgggtgcgacaggcccctggacaagggcttgagtggatgggagggatcacccctctctttgacacaacaaactacgcacagaagttccagggcagagtcacgattaccgcggacgaatccacgagcacagcctacatggagctgagcagcctgagatctgaggacacggccgtatatttctgtgcgagagccccagaagggccttattacgatagtttgactgtcccgcactactactacggtatggacgtctggggccaagggaccacggtcaccgtctcctca

SEQ ID NO: 10166 - DNA, 390 bp, Homo sapiens
gaggtgcagctgttggagtctgggggaggcttggtacagcctggggggtccctgagactctcctgtgcagcctctggattcacctttagcagctatgccatgagctgggtccgccaggctccagggaaggggctggagtgggtctcagctattagtggtagtggtggtagcacatactacgcagactccgtgaagggccggttcaccatctccagagacaattccaagaacacgctgtatctgcaaatgaacagcctgagagccgaggacacggccgtatattactgtgcgaaaatcaaagagggaggggggttcggggagttatcagcgggctactactactacggtatggacgtctggggccaagggaccacggtcaccgtctcctca

SEQ ID NO: 10167 - DNA, 355 bp, Homo sapiens
caggtgcagctgcaggagtcgggcccaggactggtgaagccttcgctgaccctgtccctcacctgcgctgtctctggtgactccatcagcagtggtggttactcctggagctggttccggcagccaccagggaagggactggagtggattgggtatatctattacagtgggagcacctactacaacccgtccctcaagagtccagttaccatatcagtggacacgtccaagaaccagttctccctgaagctgaggtctgtgaccgccgcggacacggccgtgtattactgtgccaggggtgtaacctactactttgactcctggggccagggaaccctggtcaccgtctcctcag

SEQ ID NO: 10168 - DNA, 390 bp, Homo sapiens
gaggtgcagctggtacagtctggagcagaggtgaaaaagcccggggagtctctgaggatctcctgtaagggttctggatacagtttttcccgctactggatcacctgggtgcgccagatgcccgggaaaggcctggagtggatggggaacattgatcctagtgactcttataccaactacagcccgtccttccaaggccacgtcaccatctcagctgacaagtccatcaacactgcctacctgcagtggagcagcctgaaggcctcggacaccgccatgtattactgtgcgagacaaccccagaaggtgtatgatagtagtggttattcgggccactattactacggtatggacgtctggggccaagggaccacggtcaccgtctcctca

SEQ ID NO: 10169 - DNA, 391 bp, Homo sapiens
caggtgcagctggtggagtctgggggaggcgtggtccagcctggggggtccctgagactctcctgtgcaacgtctggattcaccttcagtagctatggcttccactgggtccgccaggctccaggcaaggggctggagtgggtggcatttatacggtatgatggaagcagtaaatactatgtagactccgtgaagggccgattcaccatctccagtgacaattccaagagcacgctgtatctgcaaatgaacagcctgagagctgaggacacggctgtgtattactgtgcgaaggatctaaggcattattactatgatggtagtggttatgagggcgtctccgggtgtaacgactactggggccagggaaccctggtcaccgtctcctcag

SEQ ID NO: 10170 - DNA, 373 bp, Homo sapiens
gaggtgcagctggtggagtctgggggaggcttggtaaagcctggggggtcccttagactctcctgtgcagcctctggattcactttcagtaacgcctggatgagctgggtccgccaggctccagggaaggggctggagtgggttggccgtattaaaagcaaaactgatggtgggacaacagactacgctgcacccgtgaaaggcagattcaccatctcaagagatgattcaaaaaacacgctgtatctgcaaatgaacagcctgaaaaccgaggacacagccgtgtattactgtaccacagtcgcgagtgggagatggcttataatgtacttcgatctctggggccgtggcaccctggtcactgtctcctcag

SEQ ID NO: 10171 - DNA, 352 bp, Homo sapiens
gaggtgcagctggtggagtccgggggaggcttagttcagcctggggggtccctgagactctcctgtgcagcctctggattcaccttcagtagctactggatgcactgggtccgccaagctccagggaaggggctggtgtgggtctcacgtatcaatagtgatgggagtagcataagctacgcggactccgtgaagggccgaatcaccatctccagagacaacgccaagaatacgctgtatctgcaaatgcacagtctgagagccgaggacacggctgtgtattactgtgcaagagagacgtatagcagctttgaccactggggccagggaaccctggtcaccgtctcctcag

SEQ ID NO: 10172 - DNA, 352 bp, Homo sapiens
caggtgcagctggtggagtctgggggaggcttggtcaagcctggagggtccctgagactctcctgtgcagcctctggattcaccttcagtgactactacatgagctggatccgccaggctccagggaaggggctggagtgggtttcatacattagtagtagtggtagtaccatatactacgcagactctgtgaagggccgattcaccatctccagggacaacgccaagaactcactgtatctgcaaatgaacagcctgagagccgaggacacggccgtgtattactgtgcgagagcagtttgggggggtttgggctactggggccagggaaccctggtcaccgtctcctcag

SEQ ID NO: 10173 - DNA, 361 bp, Homo sapiens
gaggtgcagctggtggagtctgggggaggcttggtacagcctggggggtccctgagactctcctgtgtagcctctggattcaccttcagtacctatagcatgaactgggtccgccaggctccagggaaggggctagagtgggtttcatacattagtagtagtagtagaaccatatactacgcagactctgtgaagggccgattcaccatctccagagacaatgccaagaactcactgtatctgcaaatgaatagcctgagagacgaggacacggctgtgtattattgtgcgagagaggtggcagtggctggtacggagattgactactggggccagggaaccctggtcaccgtctcctcag

SEQ ID NO: 10174 - DNA, 387 bp, Homo sapiens
caggtgcagctgcaggagtcgggcccaggactggtgaagccttcggagaccctgtccctcacctgcactgtctctggtggctccatcagtagttactactggagctggatccggcagcccgccgggaagggactggagtggattgggcgtatctataccagtgggagcaccaactacaacccctccctcaagagtcgagtcaccatgtcagtagacacgtccaagaaccagttctccctgaagctgagctctgtgaccgccgcggacacggccgtgtattactgtgcgagagattccctaggatattgtagtagtaccagctgcatcaactactactactacggtatggacgtctggggccaagggaccacggtcaccgtctcctca

SEQ ID NO: 10175 - DNA, 352 bp, Homo sapiens
gaggtgcagctgttggagtctgggggaggtttggtacagcctggggggtccctgagactctcctgtgcagcctctggattcacctttagcagctatgccatgagctgggtccgccaggctccagggaaggggctggagtgggtctcaggtattagtagtagtggtggtagcacatactacgcagactccgtgaagggccggttcaccatctccagagacaattccaagaacacgctgtctctgcaaatgaacagcctgagagccgaggacacggccctatattactgtgcgagagatcttggtggttactttcactactggggccagggagcccaggtcaccgtctcctcag

SEQ ID NO: 10176 - DNA, 391 bp, Homo sapiens
gaagtgcagctggtggagtctgggggaggcttggtacagcctggggggtccctgagactctcctgtgcagcctctggattcaccttcagtaactatagcatgaactgggtccgccaggctccagggaaggggctggagtgggtttcatacatttttagtagcagtagtaccatatactacgcagactctgtgaagggccgattcgccatctccagagacaatgtcaagaactcactgtatctgcaaatgaacagcctgagagacgcggacacggctgtgtattactgtgcgagagctccacgaggctatgattacgtttgggggagttatcgttatgacctttactactttgactactggggccagggaaccctggtcaccgtctcctcag

SEQ ID NO: 10177 - DNA, 352 bp, Homo sapiens
caggtgcagctggtgcagtctggggctgaggtgaagaagcctggggcctcagtgaaggtctcctgcaaggcttctggatacaccttcaccggctactatgtacactgggtgcgacaggcccctggacaagggcttgagtggatgggatggatcaaccctaacagtggtggcacaaactatgcacagaagtctcagggcagggtcaccatgaccagggacacgtccatcagcacagcctacatggagctgagcaggctgagatctgacgacacggccgtctattactgtgcgagaggcaccccggcaaagagtgactactggggccagggaaccctggtcaccgtctcctcag

SEQ ID NO: 10178 - DNA, 352 bp, Homo sapiens
caggtccagctggtacagtctggggctgaggtgaagaagcctggggcctcagtgagggtctcctgcaaggtttccggatacaccctcactaaattatccatgcactgggtgcgacaggctcctggaaaagggcttgagtggatgggaggttttgatcctgaagatggtgaaacgatctacgcacagaagttccagggcagagtcaccatgaccgaggacacatctacagacacagcgtacatggacctgagcagcctgagatctgacgacacggccgtatactactgtgcaatttcatggagatatgcttttgatatctggggccaggggacaatggtcaccgtctcttcag

SEQ ID NO: 10179 - DNA, 351 bp, Homo sapiens
caggtgcagctggtggagtctgggggaggcgtggtccagcctgggaggtccctgagactctcctgtgcagcgtctggattcaccttcagtaaccatggcatgcactgggtccgccagggtccaggcaaggggctggagtgggtggcagttatatggtatgatggaagtaaaaaatactatgcagactccgtgaagggccgatccaccatctccagagacaattccaagaacacgctgtatctacaaatgaacagcctgagagccgaggacacggctgtgtattattgtgcgagagaagatattgtaacattggacgtctggggccaagggaccacggtcaccgtctcctca

SEQ ID NO: 10180 - DNA, 367 bp, Homo sapiens
gaagtgcagctggtggagtctgggggaggcttggtacagcctggcaggtccctgagactctcctgtgcagcctctggattcacctttgatgattatgccatgcactgggtccggcaagctccagggaagggcctggagtgggtctcaggtattagttggaatagtggtagcataggctatgcggactctgtgaagggccgattcaccatctccagagacaacgccaagaactccctgtatctgcaaatgaacagtctgagagctgaggacacggccttgtattactgtgcaaaaggtcaattactatggttcggggcggcatacttccagcactggggccagggcaccctggtcaccgtctcctcag

SEQ ID NO: 10181 - DNA, 361 bp, Homo sapiens
caggtacagctgcagcagtcaggtccaggactggtgaagccctcgcagaccctctcactcacctgtgccatctccggggacagtgtctctagcaacagtgctgcttggaactggatcaggcagtccccatcgagaggccttgagtggctgggaaggacatactacaggtccaagtggtataatgattatgcactgtctgtgaaaggtcgaataaccatcaacccagacacatccaagaaccagttctccctgcagctgaactctgtgactcccgaggacacggctgtgtattattgtgcaaggatagtgggagctacagtcgactactggggccagggaaccctggtcaccgtctcctcag

SEQ ID NO: 10182 - DNA, 384 bp, Homo sapiens
gaagtgcagctggtggagtctgggggaggcttggtacagcctggcaagtccctgagactctcctgtgcagcctctggattcacctttgatgattatgccatgcactgggtccggcaagctccagggaagggcctggagtgggtctcaggtattagttggaatagtggtaccataggctatgcggactctgtgaagggccgattcatcatctccagagacaacgccaagaactccctatatctgcaaatgatccgtctgagagctgaggacacggccttgtattactgtgcaaaagatatacggacgtatttctatgatattagtgcttccgaggactacggtatggacgtctggggccaagggaccacggtcaccgtctcctca

SEQ ID NO: 10183 - DNA, 390 bp, Homo sapiens
gaagtgcagctggtggagtctgggggaggcttggtacagcctggcaggtccctgagactctcctgtgaagcctctggattcacctttgaggattatgccatgcactgggtccggcaagctccagggaagggcctggagtgggtctcaggtgttagttggaacagtggtatcataggttatgcggactctgtgaagggccgattcaccatctccagagacaacgccaagaactccctgtatctgcaaatgaacagtctgagagctgaggacacggccctgtattattgtgcaaagtggggtggatatagtggcttcgattttggggattcgcagagggactactatggtatggacgtctggggccaagggaccacggtcaccgtctcctca

SEQ ID NO: 10184 - DNA, 352 bp, Homo sapiens
caggtgcagctggtggagtctgggggaggcgtggtccagcctgggaggtccctgagactctcctgtgcagcgtctggattcaccttcagtagctatggaatgcactgggtccgccaggctccaggcaaggggctggagtgggtggcagttatatggtatgatggaagtaataaatattatgcagactccgtgaagggccgattcaccatctccagagacagttccaagaacacgctgtatctgcaaatgaacagcctgagagtcgaggacacggctgtgtattactgtgcgagagagaacagggtcgacctagactactggggccagggaaccctggtcaccgtctcctcag

SEQ ID NO: 10185 - DNA, 387 bp, Homo sapiens
cagctgcagctgcaggagtcgggcccaggactggtgaagccttcggagaccctgtccctcacctgcactgtctctggtggctccatcagcagtagtagttactactggggctggatccgccagcccccagggaaggggctggagtggattgggagtatctattatagtgggagcacctactacaacccgtccctcaagagtcgagtcaccatatccgtagacacgtccaagaaccagttctccctgaagctgagctctgtgaccgccgcagacacggctgtgtattactgtgcgagaagactattacgatattttgactggtccgtcgccaactactactacggtatggacgtctggggccaagggaccacggtcaccgtctcctca

SEQ ID NO: 10186 - DNA, 387 bp, Homo sapiens
caggtcaccttgagggagtctggtcctgcgctggtgaaacccacacagaccctcacactgacctgcaccttctctgggttctcactcagcactactggcatgtgtgtgagctggatccgtcagcccccagggaaggccctggagtggcttgcactcattgattgggatgatgataaatactacagcacatctctgaagaccaggctcaccatctccagggacacctccaaaaaccaggtggtcctgacaatgaccaacatggaccctctggacacagccacctattactgtgcacggatgtacggggagttttcgttcgcggggccaaattattcttactacggtttggacgtctggggccaagggaccacggtcaccgtctcctca

SEQ ID NO: 10187 - DNA, 387 bp, Homo sapiens
caggtgcagctgcaggagtcgggcccaggactggtgaagccttcacagaccctgtccctcacctgcactgtctctggtggctccatcagcagtggtggttactactggagctggatccgccagcacccagggaagggcctagagtggattgggaacatctattacagtgggagcacctcctacaacccgtccctcaagagtcgacttaccatgtcagtagacacgtctaagaaccagttctccctgaggctgagctctgtgactgccgcggacacggccgtgtattactgtgcgagagatcctggggcgggtaactacggtggctattacttttactactacggtatggacgtctggggccaagggaccacggtcaccgtctcctca

SEQ ID NO: 10188 - DNA, 384 bp, Homo sapiens
caggtgcagctggtgcagtctggggctgaggtgaagaagcctggggcctcagtgaaggtctcctgcaaggtttccggatacaccctcattgaattatccatgcactgggtgcgacaggctcctggaaaagggcttgagtggatgggaggttttgatcctgaagatgctgaaacaatctacgcacagaggttccagggcagagtcaccatgaccgaggacacatctacagacacagcctacatggagctgagcggcctcagatctgaggacacggccgtgtattactgtgcaacagccccagcagtggctggcaccccgcgggattactactactactacggtatggacgtctggggccaagggaccacggtcaccgtctcctca

SEQ ID NO: 10189 - DNA, 384 bp, Homo sapiens
caggtccagctggtacagtctggggctgaggtgaagaagcctggggcctcagtgaaggtctcctgcaaggtttccggatacagcctcactgaattatccatgcactgggtgcgacaggctcctggaaaagggcttgagtggatgggaggttttgatcctgaagatggtgaaacaatctacgcacagaagttgcagggcagagtcaccatgaccgaggacacatcttcagatacggcctacatggagctgagcagcctgagatctgacgacacggccgtgtattactgtgcagcaggtacagcagtgggtggtacacccagctactactactactactacggtatggacgtctggggccaagggaccacggtcaccgtctcctca

SEQ ID NO: 10190 - DNA, 364 bp, Homo sapiens
caggtgcagctgcaggagtcgggcccaggactggtgaggccttcggagaccctgtccctcacctgcactgtctctggtggctccatcaatagctactactggagctggatccggcagcccccagggaagggactggagtggattgggtatatctattacagtgggagcaccaactacaacccctccctcaagagtcgagtcaccatatcagtagacacgtccaagaaccagttctccctgaagctgagctctgtgaccgctgcggacacggccgtctattactgtgcgagccacaagagtggatacacctatagttatccttttgactcctggggccagggaaccctggtcaccgtctcgtcag

SEQ ID NO: 10191 - DNA, 387 bp, Homo sapiens
gaggtgcagctggtggagtctgggggaggcctggtcaagcctggggggtccctgagactctcctgtgcagcctctggattcaccttcagtagctttggcatgacctgggtccggcaggctccagggaaggggctggagtgggtctcattcattagtagtagtaggaggagtgacatacactacgcagactcaatgaagggccgatttaccatctccagagacaacgccaagaactcactgtatctgcacatgaacagcctgagagccgaggacacggctgtgtattactgtgcgagagatctcgatagtggctacgccaaatttgggggctactactactacggtatggacgtctggggccaagggaccacggtcaccgtctcctca

SEQ ID NO: 10192 - DNA, 384 bp, Homo sapiens
gagattcacctagtggagtctgggggaggcttggtccagcctgggaggtccctgagactctcctgtgcagcctctggattcacctttagtacctattggatgagctgggtccgccaggctccagggaaggggctggagtgggtggccaacataaggcaagatggcagtgagaaatactatgtggactctgtgaagggccgattcaccatctccagagacaacgccaagaactcactgtatctggtaatgagcagcctgagagccgaggacacggccgtgttttactgtgcgagaatctctgttggatacagctatgatcacggctactactactactacggtatggacgtctggggccaagggaccacggtcaccgtctcctca

SEQ ID NO: 10193 - DNA, 384 bp, Homo sapiens
gaggtgcagctggtgcagtctggagcagaggtgaaaaagcccggggagtctctgaagatctcctgtaagggttctggatacacttttaccagccactggatcgcctgggtgcgccagatgcccgggaaaggcctggagtggatgggaatcatctatcctggtgactctgataccagatacagcccgtccttccaaggccaggtcaccatctcagccgacaagtccatcagcaccgcctccctgcagtggagcagcctgagggcctcggacaccgccatgtattactgtgcgagactcaattactatggttcggggagttattttaaagctcatcactacgatttggacgtctggggccaagggaccacggtcaccgtctcctca

SEQ ID NO: 10194 - DNA, 384 bp, Homo sapiens
caggtgcagctggtggagtctgggggaggcgtggtccagcctggggggtccctgagactctcctgtgcagcgtctggattcaccttcagtagctatggcatgcactgggtccgccaggctccaggcaaggggctggagtgggtggcatttatacggtatgatggaagtaataaatactatgcagactccgtgaagggccgattcaccatctccagagacaattccaagaacacgctgtatctgcaaatgaacagcctgagagctgaggacacggctgtgtattactgtgcgaaagcgggattcagaaacgttatagcagtggctggtcgcggtgcctacggtatggacgtctggggccaagggaccacggtcaccgtctcctca

SEQ ID NO: 10195 - DNA, 384 bp, Homo sapiens
caggtgcagctggtggagtctgggggaggcgtggtccagcctgggaggtccctgagactctcttgtgtagcctctggattcaccttcagtagctatgacatgcactgggtccgccaggctccaggcaaggggctggagtgggtggcagttatatcatatgatggaagtaataaatattatgtagactccgtgaagggccgattcaccatctccagagacaattccaagaacacgctgtatctgcaaatgaacagcctgagaggtgaggacacggctgtgtattactgtgcgaaagatcttcgggggagccagctatggatacgttacggcgactaccacggtatggacgtctggggccaagggaccacggtcaccgtctcctca

SEQ ID NO: 10196 - DNA, 390 bp, Homo sapiens
gaggtgcagctggtggagtccgggggaggcttggtccagcctggggggtccctgaaactctcctgtgcagcctctgggttcaccttcagtggctctgctatgcactgggtccgccaggcttccgggaaagggctggagtgggttggccgtattagaagcaaagctaacagttacgcgacagcatatgctgcgtcggtgaaaggcaggttcaccatctccagagatgattcaaagaacacggcgtatctgcaaatgaacagcctgaaaaccgaggacacggccgtgtattactgtactagacgggacgattacgatttttggagtggttattatagcgactactacggtatggacgtctggggccaagggaccacggtcaccgtctcctca

SEQ ID NO: 10197 - DNA, 384 bp, Homo sapiens
caggtgcagctggtgcagtctggggctgaggtgaaggagcctgggtcctcggtgaaggtctcctgcaaggcttctggcggccccttcagcagctatgctatcagttgggtgcgacaggcccctggacaaggccttgagtggatgggagggatcatccctatgtttggtgcaccaaactacgcacagaagttccagggcagagtctcgataaccgcggacgaatctacgagcacagcctacatgtacctgagcaggctgagatctgaggacacggccgtgtattactgtgcgagaccgaggaagggggctttcggggaggtgttaatgggctattattacggtatggacgtctggggccaagggaccacggtcaccgtctcctca

SEQ ID NO: 10198 - DNA, 385 bp, Homo sapiens
caggtgcagctggtgcagtctggggctgaggtgaaggagcctgggtcctcggtgaaggtgtcctgcaaggcttctggagacaccttcagcaggtacataatcaggtgggtgcgacaggcctctggacaagggcttgaatggatgggagggatcttccctatctttggcacaccgaagtacgcagagaagttccagggcagagtcacaataaccgcggacgcatctacgagcacagcctacatggaactgagcggcctgagacctgaagacacggccatatactactgtgcgaacactctcatcacggaggtcaacgtggacacagctgtggtccaagtcggccttgaatactggggccagggaaccctggtcaccgtctcctcag

SEQ ID NO: 10199 - DNA, 385 bp, Homo sapiens
caggtgcagctggtgcagtctggggctgaggtgaggaagcctgggtcctcggtgaaaatctcctgcaaggcttctggaggcaccttcagtgcctatgctatcagctgggtgcgacaggcccctggacaagggcttgagtggatgggagggatcatccctatctttggtccagcaaacgacgcacagaagttccagggcagagtcacgtttaccgcggacgaatccaggagcacagcctacatggagctgagcagcctgagatctgaggacacggccgtgtattactgtgcgagacagttacagccgctctttgacgtttgggggagctatcgttacagccggcttgaccattggggccagggaacccaggtcaccgtctcctcag

SEQ ID NO: 10200 - DNA, 349 bp, Homo sapiens
gaggtgcaactggtggagtctggaggaggcttgatccagcctggggggtccctgagactctcctgtgcagcctctgggttcaccgtcagtagcaactacatgagctgggtccgccaggctccagggaaggggctggagtgggtctcagctatttatagcggtggtagcacattctacgcagactccgtgaagggccgattcaccatctccagagacaattccaagaacacgctgtatcttcaaatgaacagcctgagagccgaggacacggccgtgtattactgtgcgagagatatggttcggggagacatcatctggggccagggaaccctggtcagcgtctcctcag

SEQ ID NO: 10201 - DNA, 364 bp, Homo sapiens
caggtgcagctgcaggagtcgggcccaggactggtgaagccttcggagaccctgtccctcacctgcactgtctctggtggctccatcagtagttactactggagctggatccggcagcccccagggaagggactggagtggattgggtatatctattacagtgggagcaccaactacaacccctccctcaagagtcgagtcaccatatcagtagacacgtccaagaaccagttctccctgaagctgagctctgtgaccgctgcggacacggccgtgtattactgtgcgagagatggtgggggcagctggtactcgggttggttcgacccctggggccagggaaccctggtcaccgtctcctcag

SEQ ID NO: 10202 - DNA, 349 bp, Homo sapiens
gaggtgcagctggtggagtctggaggaggcttgatccagcctggggggtccctgagactctcctgtgcagcctctgggttcaccgtcagtagcaactacatgagctgggtccgccaggctccagggaaggggctggagtgggtctcagttatttatagcggtggtagcacatactacgcagactccgtgaagggccgattcaccatctccagagacaattccaagaacacgctgtatcttcaaatgaacagcctgagagccgaggacacggccgtgtattactgtacttcggatacagctatggtggttgactactggggccagggaaccctggtcaccgtctcctcag

SEQ ID NO: 10203 - DNA, 385 bp, Homo sapiens
caggtgcagctggtgcagtctggggctgaggtgaagaagcctggggcctcagtgaaggtttcctgcaaggcatctggatacaccttcacccgctactatatgcactgggtgcgacaggcccctggacaagggcttgagtggatgggaataatcaaccctagtggtggtagcacaagctacgcacagaagttccagggcagagtcaccatgaccagggacacgtccacgagcacagtctacatggagctgagcagcctgagatctgaggacacggccgtctattactgtgcgagagtttttttggggggcgattgtggtggtgactgctaccggggggggcaccttgactactggggccagggaaccctggtcaccgtctcctcag

SEQ ID NO: 10204 - DNA, 385 bp, Homo sapiens
caggtgcagctggtgcagtctggggctgaggtgaagaagcctggggcctcagtgagggtttcctgcaaggcatctggataccccttcaccagctactatatgcagtgggtgcgacaggcccctggacaagggcttgagtgggtgggaataatcaaccctagtggtggtagcacaacctacgcacagaagttccagggcagagtcaccatgaccagggacacgtccacgacaacagtctacatggagctgagcagcctgagatctgaggacacggccgtatattactgtgcgagagtcagttcttgggggactccagctcaggtagcagtggctggtaactaccttgactactggggccagggaaccccggtcaccgtctcgtcag

SEQ ID NO: 10205 - DNA, 385 bp, Homo sapiens
gaggtgcagctggtgcagtctggagcagaggtgaaaaagcccggggagtctctgaggatctcctgtaagggttctggataccgctttaccaacttctggatcggctgggtgcgccagatgcccgggaaaggcctggagtggatggggatcatctatcctggtgactctgataccagctacagcccgtccttccaaggccaggtcaccatctcagccgacaagtccatcagcaccgcctacctgcagtggagcagcctgaaggcctcggacaccgccatgtattactgtgcgagggccccgggctactatgataggagtggttattactcctctgactactactttgacaactggggccagggaaccctggtcaccgtctcctcag

SEQ ID NO: 10206 - DNA, 384 bp, Homo sapiens
gaggtgcagctgttggagtctgggggaggcttggtacagcctggggggtccctgagactctcctgtgcagcctctggattcacctttagcagctatgccatgacctgggtccgccaggctccagggaaggggctggagtgggtctcaggtattagtggtagtggtggtagcacataccacacagactccgtgaagggccggttcaccatctccagagacaattccaagaacacgctgtatctgcaaatgaacagcctgagagccgaggacacggccgtgtattactgtgcgaaagtcgcgggttacgaattttggagtggtccaggaccgggagagggcggtatggacgtctggggccaagggaccacggtcaccgtctcctca

SEQ ID NO: 10207 - DNA, 385 bp, Homo sapiens
gaggtgcagctgttggagtctgggggaggcttggtacagcctggggggtccctgagactctcctgtgcagcctctggattcacctttagcacccatgccatgaactgggtccgccaggctccaggggaggggctggagtgggtctcagttattagtagtggtggtggtagcacatactacgcagactccgtgaagggccggttcaccatctccagagacaattccaagaacacgctctttctgcaaatgaacagcctgagagtcgaggacacggccgtatattactgtgcgcaagcatcatccatttcccggtattgtaatagtcccaactgcttttactactttgactactggggccagggaaccctggtcaccgtctcctcag

SEQ ID NO: 10208 - DNA, 385 bp, Homo sapiens
gaggtgcagctgttggagtctgggggaggcttggtacagccgggggggtccctgagactctcctgtgctacctctggattcacctttggcagctatgccatgaactgggtccgccaggctccagggaaggggctggagtgggtctcagctattagtagaagtggtgatagcacatactacgcagactccgtgaagggccggttcaccatctccagagacaattccaagaacacgctgtatctgcaaatgaacagcctgagagccgagaacacggccatatattactgtgcgaaagcatcatccatttcccggtattgtagtagtcccaactgctattactacttcgactactggggccagggaaccctggtcaccgtctcctcag

SEQ ID NO: 10209 - DNA, 385 bp, Homo sapiens
caggtgcttctggtggagtctgggggaggcgtggtccagcctgggaggtccctgagactctcctgtgcagcctctggattcaccttcagtagctatgacatgcactgggtccgccaggctccaggcaaggggctggagtgggtggcagttatatcatatgatggaagtaataaatactatggagactccgtgaagggccgattcaccatctccagagacaagtccaggaacacgctgtatctgcaaatgaacagcctgagagctgaggacacggctgtgtatttctgtgcgaaacgaggggggggtggatattgtagtggtggtagctgctactcggggtactttgactactggggccagggaaccctggtcaccgtctcctcag

SEQ ID NO: 10210 - DNA, 388 bp, Homo sapiens
cagctgcagctgcaggagtcgggcccaggactggtgaagccttcggagaccctgtccctcacctgcactgtctctggtggctccatcagcagtagtagttactactggggctggatccgccagcccccagggaaggggctggagtggattgggagtatctattatagtgggagcacctactacaacccgtccctcaagagtcgagtcaccatatccgtagacacgtccaagaaccagttctccctgaagctgagctctgtgaccgccgcagacacggctgtgtattactgtgcgagacacggcaaccccgagggagttgtatggttcggggagttatatggctactttgactactggggccagggaaccctggtcaccgtctcctcag

SEQ ID NO: 10211 - DNA, 388 bp, Homo sapiens
cagctgcagctgcaggagtcgggcccaggactggtgaagccttcggagaccctgtccctcacctgcactgtctctggtggctccatcagcagtagtagttactactggggctggatccgccagcccccagggaaggggctggagtggattgggagtatctattatagtgggagcacctactacaacccgtccctcaagagtcgagtcaccatatccgtagacacgtccaagaaccagttctccctgaagctgagctctgtgaccgccgcagacacggctgtgtattactgtgcgagacaggcacgtgattactatgatagtagtggttattacggcccggtctactttgactactggggccagggaaccctggtcaccgtctcctcag

SEQ ID NO: 10212 - DNA, 367 bp, Homo sapiens
caggtgcagctggtggagtctgggggaggcgtggtccagcctgggaggtccctgagactctcctgtgcagcctctggattcaccttcagtagctatggcatgcactgggtccgccaggctccaggcaaggggctggagtgggtggcagttatatcatatgatggaagtaataaatactatgcagactccgtgaagggccgattcaccatctccagagacaattccaagaacacgctgtatctgcaaatgaacagcctgagagctgaggacacggctgtgtattactgtgcgaaacatcgccgttacgatacccgcggggtggcctttgactactggggccagggaaccctggtcaccgtctcctcag

SEQ ID NO: 10213 - DNA, 388 bp, Homo sapiens
cagctgcagctgcaggagtcgggcccaggactggtgaagccttcggagaccctgtccctcacctgcactgtctctggtggctccatcagcagtagtagttacttctggggctggatccgccagcccccagggaaggggctggaatggattgggaatatctattatagtgggagcacctactacaacccgtccctcaagagtcgagtcaccatatccgtagacacgtccaagaaccagttctccctgaagctgagctctgtgaccgccgcagacacggctgtgtattactgtgcgagtccccccgaggccaacgcgtattactatgatagtagtggttatttccgatttgactactggggccagggaaccctggtcaccgtctcctcag

SEQ ID NO: 10214 - DNA, 385 bp, Homo sapiens
caggtgcagttggtgcagtctggggctgaggtgaagaagccagggtcctcggtgaaggtctcctgcaaggcttttggaggcaccttcagcacctatgctatcagctgggtgcgacaggcccctggacaagggcttgagtggatgggagggatcatccctatctttggtacagaaaactacgcacagaagttccagggcagagtcacgattgccgcggacgaatccacgagcacagcctacatggagctgagcagcctgagatctgaggacacggccgtgtattactgtgcgagactgggggggtcgacttattactatgatagtagtgcttatggccgcccaatctccccctggggccagggaaccctggtcaccgtctcctcag

SEQ ID NO: 10215 - DNA, 382 bp, Homo sapiens
gaggtgcagctggtggagtctggaggaggcttgatccagcctggggggtccctgagactctcctgtacagcctctgggttcaccgtcagtagcaactacatgagctgggtccgccaggctccagggaaggggctggagtgggtctcagttatttatagcggtggtagcacatactacgcagactccgtgaagggccgattcaccatctccagagacaattccaagaacacgctgtatcttcaaatgaacagcctgagagccgaggacacggccgtgtattactgtgcgagagacaaacatgattactatgatagtagtgcttaccatcgcctgggggcttttgatatctggggccaagggacaatggtcaccgtctcttcag

SEQ ID NO: 10216 - DNA, 385 bp, Homo sapiens
gaggtgcagctggtggagtctgggggaggcctggtcaagcctggggggtccctgagactctcctgtgcagcctctggattcaccttcagtagctatagcatgaactgggtccgccaggctccagggaaggggctggagtgggtctcatccattagtagtagtagtagttacatatactacgcagactcagtgaagggccgattcaccatctccagagacaacgccaagaactcactgtatctgcaaatgaacagcctgagagccgaggacacggctgtgtattactgtgcgagacagccttatttaacgtattactatggttcggggcattgggagtactactttgactactggggccagggaaccctggtcaccgtctcctcag

SEQ ID NO: 10217 - DNA, 388 bp, Homo sapiens
caggtcaccttgagggagtctggtcctgcgctggtgaaacccacacagaccctcacactgacctgcaccttctctgggttctcactcagcactagtggagtgtgtgtgagctggatccgtcagccccccgggaaggccctggagtggcttgcagtcattgactgggatgatgataaatactacatcacatctctgaagaccaggctcaccatctccaaggacacctccaaaaaccaggtggtccttacaatgaccaacatggaccctgtggacacagccacctattactgtgcacggacctgtattagtatggttcggggacttacggcggagggccctgatgcttttgatatctggggccaagggacaatggtcaccgtctcttcag

SEQ ID NO: 10218 - DNA, 349 bp, Homo sapiens
gaggtgcagctgttggagtctgggggaggcttggttcagcctggggggtccctgagactctcctgtgcagcctctggattcacctttagcaattatgccatgagctgggtccgccaggctccagggaaggggctggagtgggtctcaactattagtggtagtggtggtagcacatactccgcagactccgtgaagggccggttcaccatctccagagacaattccaagaacaccctgtatctgcaaatgaacagcctgagagccgacgacacggccgtatattactgtgcgcggagcagtggcacgattgactactggggccagggaaccctggtcaccgtctcctcag

SEQ ID NO: 10219 - DNA, 349 bp, Homo sapiens
gaggtgcagctgttggagtctgggggaggcttggtacagccgggggggtccctgagactctcctgtgcagtctctggattcaccgttatcaactatgccatgagctgggtccgccaggctccagggaaggggctggagtgggtctcacttgttagtgttgatggtgaaagcacatactacgcagactccgtgaagggccggttcaccatctccagagacagttccaacaacacactgtatctacaaatgcacagcctgagagccgacgacacggccctgtattactgtgcgaagggatggagttacggtgataactggggccagggaaccctggtcaccgtctcctcag

SEQ ID NO: 10220 - DNA, 385 bp, Homo sapiens
gaagtgcagctggtggagtctgggggaggcttggtacagcctggcaggtccctgagactctcctgtgcagcctctggactcacctttgatgattatgccatgcactgggtccggcaagctccagggaagggcctggagtgggtctcaggtgttacttggaatagtggtaccataggctatgcggactctgtgaagggccgagtcatcatcatcagagacaacgccaagaactccctgtatctgcaaatgaacagtctgagagctgaggacacggccttatattactgtgcaaaagagtctttacgtttgggggagtcatcgttattctcgccgcaagtggcttttgatgtctggggccaagggacaatggtcatcgtctcttcag

SEQ ID NO: 10221 - DNA, 369 bp, Homo sapiens
cagctgcagctgcaggagtcgggcccaggactggtgaagccttcggagaccctgtccctcacctgcacagtctctggtggctccatcagcagtagtagttactactggggctggatccgccagcccccagggaagggactggagtggattgggagtatctattatggtgggaccacctatgacaacccgtccctcaagagtcgagtcaccatatccgtagacgcgtccaagaatcagttctccctgaagctgacctctgtgaccgccgcagacacggctgtgtattactgtgcgagactctacgatttttggagtcactactacggtatggacgtctggggccaagggaccacggtcaccgtctcctca

SEQ ID NO: 10222 - DNA, 385 bp, Homo sapiens
gaagtgcagctggtggagtctgggggaggcttggtacagcctggcaggtccctgagactctcctgtgcagcctctggattcacctttgatgattatgccatgcactgggtccggcaagctccagggaagggcctggagtgggtctcaggtattagttggaatagtggtaccatagcctatgcggactctgtgaagggccgattcaccatctccagagacaacgccaagaactccctgtatttgcaaatgaacagtctgagagctgaggacacggccctatattattgtgcaaaagagacttgtggtgctgactgctattcgctaattatcagtggcgatgcatttgatatctggggccaagggacaatggtcaccgtctcttcag

SEQ ID NO: 10223 - DNA, 385 bp, Homo sapiens
gaagtgcagctggtggagtctgggggaggcttggtacagcctggcaggtccctgagactctcctgtgcagcctctagattcacctttgaggattatgccatgcactgggtccggcaagctccagggaagggcctggagtgggtctcaggtattagttggaatagtggtagcataggctatgcggactctgtgaagggccgattcattatctccagagacaacgccaagaactccctgtatctgcaaatgaacagtctgagagctgaggacacggccttgtattactgtgcaaaagcatacgatatctatgatagtagtggtaattactacgtctttgatgcttttgatatgtggggccaagggacaatggtcaccgtctcttcag

SEQ ID NO: 10224 - DNA, 385 bp, Homo sapiens
caggtgcagctggtgcagtctggggctgaggtgaagaagcctgggtcctcggtgaaggtctcctgcaaggcttctggaggcaccttcagcagtcatgctatcagctgggtgcgacaggcccctggacaagggcttgagtggatgggagggatcatccctatgtttgggacagcaaattacgcaccgaagttccagggcagagtcacgattaccgcggacgaatctacgaacacagcctacatggaactgagcagcctgagatctgaggacacggccgtgtattactgtgcgagagatggggaacccgcatattgtcgtggtggtagttgctattatgatgcttttgatatctggggccaagggacaatggtcaccgtctcttcag

SEQ ID NO: 10225 - DNA, 349 bp, Homo sapiens
caggtgcagctggtggagtctgggggaggcgtggtccagcctggggggtccctgagactctcctgtgcagcgtctggattcaccttcactagctatggcatgcactgggtccgccaggctccaggcaaggggctggagtgggtggcatttatatggtatgatggaagtactaaatactatgcagactccgtgaagggccgattcaccatctccagagacaattccaagaacacggtgtatctgcaaatggacagcctgagagctgaggacacggctgtgtattactgtgcgaaaggccgggaggaccccgacccctggggccagggaaccctggtcaccgtctcctcag

SEQ ID NO: 10226 - DNA, 346 bp, Homo sapiens
gaggtgcagctggtggagtctgggggaggcttgatccagcctggggggtccctgagactctcctgtgcagcctctgggatcatcgtcagtagcaactacatgagctgggtccgccaggctccagggaaggggctggagtggctctcagttatttatagtggtggtagcacattctacgcagactccgtgaagggccgattcaccatctccagagacgattccaagaacacgctgtatcttcaaatgaacagcctgagagccgaggacacggccgtgtattactgtgcgagagaaagaccctacattgactactggggccagggaaccctggtcaccgtctcctcag

SEQ ID NO: 10227 - DNA, 358 bp, Homo sapiens
caggtacagctgcagcagtcaggtccaggactggtgaagccctcgcagaccctctcactcacctgtgccatctccggggacagtgtctctagcaacagtgctgcttggaactggatcaggcagtccccatcgagaggccttgagtggctgggaaggacatactacaggtccaagtggtataatgattatgcagtatctgtgaaaagtcgaataaccatcaacccagacacatccaagaaccagttctccctgcagctgaactctgtgactcccgaggacacggctgtgtattactgtgcaagagtttcggtctggttcgacccctggggccagggaaccctggtcaccgtctcctcag

SEQ ID NO: 10228 - DNA, 394 bp, Homo sapiens
caggtccagttggtacagtctggggctgaggtgaagaagcctggggcctcagtgaaggtctcctgcaaggtttccggatacaccctcattgaattatccatgcactgggtgcgacaggctcccggaaaagggcttgagtggatgggaggttttgaacctgaagatggtgaaacaatctacgcacagaggttccagggcagagtcaccatgaccgaggacacgtctacagacacagcctacatggagctgagcagcctgagatctgaggacacggccatgtatttctgtgcagcatcggtcatacagtattacgatcttttgactggtaattacaaatccgctcccaacgtatttgactactggggccagggaaccctgatcacagtctcctcag

SEQ ID NO: 10229 - DNA, 403 bp, Homo sapiens
caggtacagctgcagcagtcaggtccaggactggtgaagccctcgcagaccctctcactcacctgtgccatctccggggacagtgtctctagcaacagtgctgcttggaactggatcaggcagtccccatcgaaaggccttgagtggctgggaaggacatactacaggtccaagtggtataatgattatgcagtctctgtgataagtcgaatcagcatcaacccagacacatccaagaaccagttctccctgcaggtgaactctgtgactcccgaggacgcggctgtgtattattgtgcaagagttggtgtttaaagcagcgtccccgtctaacccgtccacttaccccctacgtgtgactttgactactggggccagggaaccctggtcaccgtctcctcag

SEQ ID NO: 10230 - DNA, 349 bp, Homo sapiens
gaagtgcagctggtgcagtccggagcagaggtgaaaaagcccggggagtctctgaggatctcctgtaagggttctggatacagctttaccagatactggatcagctgggtgcgccagaggcccgggaaaggcctggagtggatggggaggattaatcctagtgactctcacaccaactacagtccgtccttccaagggcacgtcaccatctcagctgacaagtccatcagcactgcctacctgcagtggagcagcctgaaggcctcggacaccgccatgtattactgtgcgaggctcgggtgggaattattctcctggggccagggaaccctggtcaccgtctcctcag

SEQ ID NO: 10231 - DNA, 367 bp, Homo sapiens
caggtgcagctggtggagtctgggggaggcgtggtccagcctgggaggtccctgagactctcctgtgcagcctctggattccccttcattagctatgctatgcactgggtccgccaggctccaggcaaggggctggagtgggtggcagttatctcatatgatggaagtaataaatactacgcagactccgtgaagggccgattcaccatctccagagacaattccaagaacacgctgtatctgcaaatgaacagcctgagagctgaagacacggctgtctattactgtgcgagagggtctcatagctacagtgagcacaactggttcgacccctggggccagggaaccctggtcaccgtctcctcag

SEQ ID NO: 10232 - DNA, 385 bp, Homo sapiens
caggtgcagctggtgcagtctggggctgaggtgaagaagcctggggcctcagtgaaggtttcctgcaaggcatctggatacaccttcaccagctactatatgcactgggtgcgacaggcccctggacaagggcttgagtggatgggaataatcaaccctagtgctggtagcacaagctacgcacagaagttccagggcagagtcaccatgaccagggacacgtccacgaccacagtctacatggacctgagcagcctgagatctgaggacacggccgtgtattactgtgcgagaggcagcggttactatgatagtagtggttattaccggccgaggggagcttttgatatctggggccaagggacaatggtcaccgtctcttcag

SEQ ID NO: 10233 - DNA, 393 bp, Homo sapiens
gaggtgcagctggtggagtctgggggaggcctggtcaagcctggggggtccctgagactctcctgtgcagcctctggattcaccttcagtagctatggcatgaactgggtccgccaggctccagggaaggggctggagtgggtctcatccattagtggtagtagtagttacatagactacgcagactcagtgaagggccgattaaccatctccagagacaatgccaacaacacactgtatctgcatatgaacagcctcagagccgaggacacggctgtctattactgtgcgagagatcattttctcggatatttggactggttagaccccccgataaaaaactactacggcatggacgtctggggccaagggaccacggtcaccgtctcctca

SEQ ID NO: 10234 - DNA, 393 bp, Homo sapiens
caggttcaactggtgcagtctggagctgaggtgaagaagcctggggcctcagtgaaggtctcctgcaaggcttctggttacacctttaacagctacggtatcagctgggtgcgacaggcccctggacaagggcttgagtggatgggatggatcaacgcttacaatggtaacacagactatgcacagaaactccagggcagagtcaccgtgaccacagatacatccacgagcacagccttcatggagctgaggagcctgagatctgacgacacggccgtgtattactgtgcgagagatcaagggcgtcagtatgatagtagtggttattcatacaactactactactacggtatggacgtctggggccaagggaccacggtcaccgtctcctca

SEQ ID NO: 10235 - DNA, 393 bp, Homo sapiens
caggtgcagctggtgcagtctggggctgaggtgaagaagcctgggtcctcggtgaaggtctcctgcaaggcttctggaggcaccttcagcagctatgctatcagctgggtgcgacaggcccctggacaagggcttgagtggatgggagggatcatccctatctttggtacagcaaactacgcacagaagttccagggcagagtcacgattaccgcggacgaatccacgagcacagcctacatggagctgagcagcctgagatctgaggacacggccgtgtattactgtgcgagagaccgctacgattactatggttcggggagtcgctttacttactactactactacggtatggacgtctggggccaagggaccacggtcaccgtctcctca

SEQ ID NO: 10236 - DNA, 393 bp, Homo sapiens
gaggtgcagctggtggagtccgggggaggcttagttcagcctggggggtccctgagactctcctgtgcagcctctggattcaccttcagtagctactggatgcactgggtccgccaagctccagggaaggggctggtgtgggtctcacgtattaatagtgatgggagtagcacaagctacgcggactccgtgaagggccgattcaccatctccagagacaacgccaagaacacgctgtatctgcaaatgaacagtctgagagccgaggacacggctgtgtattactgtgcaagagctgattactatgatagtagtggttattaccacttgttctactactactactacggtatggacgtctggggccaagggaccacggtcaccgtctcctca

SEQ ID NO: 10237 - DNA, 393 bp, Homo sapiens
caggtgcaactggtgcagtctggggctgaggtgaagaagcctggggcctcagtgaaggtctcctgtaaggcttctggatacaccttcagcagttatgatatcaactgggtccgacaggccactggacaagggcttgagtggatgggatggatgaaccctaacagtggtaacacaggctatgcacagaagttccagggcagaatcaccatgaccaggaacacctccataagcacagcctacatggagctgagcagcctgagatctgaggacacggccgtgtattactgtgcgaccccgggggcggcatattgtagtactgccagctgctacccgaactactactactacggtatggacgtctggggccaagggaccacggtcaccgtctcctca

SEQ ID NO: 10238 - DNA, 393 bp, Homo sapiens
caggtgcagctggtggagtctgggggaggcgtggtccagcctgggaggtccctgagactctcctgtgcagcctctggattcaccttcagtacctatactatgcactgggtccgccaggctccaggcaaggggctggagtgggtggcagttatatcatatgatggaagtaataaatactacgcagactccgtgaagggccgattcaccatctccagagacaattccaagaacacgctgtatctgcaaatgaacagcctgagagctgaggacacggctgtgtattactgtgcgagagcgaaattagggtactactatggttcggggagttattcgcccgtagactactatggtatggacgtctggggccaagggaccacggtcaccgtctcctca

SEQ ID NO: 10239 - DNA, 399 bp, Homo sapiens
caggtccaggtggtacagtctggggctgaggtgaagaagcctggggcctcagtgaaggtctcctgcaaggtctccggatacagcctcactgaattatccatacactgggtgcgacaggctcctggaaaagggcttgagtggatgggaggttttgatcctgaagatgctgcaacaatctacgcacagaagttccagggcagagtcaccatgaccgaggacacatctacagacacagcctacatggagctgagcagcctgagatctgaggacacggccatgtattactgtgcaacagcctttgtggtggtgactgctatgcacagaccaggccagaggggcacggactattactacggtatggacgtctggggccaagggaccacggtcaccgtctcctca

SEQ ID NO: 10240 - DNA, 374 bp, Homo sapiens
gagatgcagctggtggagtctggaggaggcttgatccagcctggggggtccctgagactctcctgtgcagcctctgagatcattgtcagtagcaactacatgacctgggtccgccaggctccagggaaggggctggagtgggtctcagttatttatagcggtggtagcacatactatgccgactccgtgaagggccgattcaccatctccagagacaattccaagaacacactgtatctgcaaatgaacagcctcagagccgaggacacggctgtgaattactgcgcgagaatgagtggtggtgatagttgcaagactactactactacggtatggacgtctggggccaagggaccacggtcaccgtctcctca

SEQ ID NO: 10241 - DNA, 367 bp, Homo sapiens
caggtgcagctggtggagtctgggggaggcgtggtccagcctgggaggtccctgagactctcctgtgcagcctctggattcaccttcagtagctatgctatgcactgggtccgccaggctccaggcagggggctggagtgggtgacagttatttcatatgatggaaataataaatactacgcagactccgtgaagggccgattcaccatctccagagacaattccaagaacacactgtatctgcaaatgaacagcctgagagctgaggacacggccgtgtattactgtgcgagagatccctggccgggtggggtctacttggaggctgactactggggccagggaaccctggtcaccgtctcctcag

SEQ ID NO: 10242 - DNA, 188 bp, Homo sapiens
ccagcaaccacatctgtcctctagagaatcccctgagagctccgatcctcaccatggactggacctggaggatcctcttgttggtcgcagcagccacagcatccccgaccagccccaaggtcttcccgctgagcctcgacagcaccccccaagatgggaacgtggtcgtcgcatgcctggtccagggc

SEQ ID NO: 10243 - DNA, 192 bp, Homo sapiens
ccaggagcacctccgagagcacagcggccctgggctgcctggtcaaggactacttccccgaaccggtgacggtgtcgtggaactcaggcgccctgaccagcggcgtgcacaccttcccggctgtcctacagtcctcaggactctactccctcagcagcgtggtgaccgtgccctccagcagcttgggcaccc

SEQ ID NO: 10244 - DNA, 394 bp, Homo sapiens
gaggtgcagctgttggagtctgggggaggcttggtacagcctggggggtccctgagactctcctgtgcagcctctggattcacctttagcagctatgccatgagctgggtccgccaggctccagggaaggggctggagtgggtctcagctattagtggtagtggtggtagcacatactacgcagactccgtgaagggccggttcaccatctccagagacaattccaagaacacgctgtatctgcaaatgaacagcctgagagccgaggacacggccgtatattactgtgcgaaagatgcttatattgtagtagtaccagctgcccttaattactatgatagtagtggttccccaggctactggggccagggaaccctggtcaccgtctcctcag

SEQ ID NO: 10245 - DNA, 339 bp, Homo sapiens
caggtgcagctgcaggagtcgggcccaggactggtgaagccttcggagaccctgtctctcacctgcactgtctctggtggctccatcagtagttattactggagctggatccggcagcccccagggaagagactggagtggattgggtatatctattacagtgggagcaccaactacaacccctccctcaagagtcgagtcaccatatcagtagacacgtccaagaaccaattctccctgaagctgagctctgtgaccgctgcggacacggccgtgtattactgtgcgagagacctcctggacgtctggggccaagggaccacggtcaccgtctcctca

SEQ ID NO: 10246 - DNA, 405 bp, Homo sapiens
caggttcagctggtgcagtctggagctgaggtgaagaagcctggggcctcagtgaaggtctcctgcaaggcttctggttacacctttaccagctacggtatcagctgggtgcgacaggcccctggacaagggcttgagtggatgggatggatcagcgcttacaatggtaacacaaactatgcacagaagctccagggcagagtcaccatgaccacagacacatccacgagcacagcctacatggagctgaggagcctgagatctgacgacacggccgtgtattactgtgcgagagatgggagtcatcagggaaaaatcccgggtatagcagcagctggtgaagtgttctactactactacggtatggacgtctggggccaagggaccacggtcaccgtctcctca

SEQ ID NO: 10247 - DNA, 343 bp, Homo sapiens
caggtgcagctggtgcagtctggggctgaggtgaagaagcctgggtcctcggtgaaggtctcctgcaaggcttctggaggcaccttcagcagctatgctatcagctgggtgcgacaggcccctggacaagggcttgagtggatgggagggatcatccctatctttggtacagcaaactacgcacagaagttccagggcagagtcacgattaccgcggacgaatccacgagcacagcctacatggagctgagcagcctgagatctgaggacacggccgtgtattactgtgcgagaatacggagtgactactggggccagggaaccctggtcaccgtctcctcag

SEQ ID NO: 10248 - DNA, 414 bp, Homo sapiens
gaggtgcagctggtggagtctgggggaggcttggtccagcctggggagtccctgagactctcctgtgcagcctctggattcacctttagtagctattgaatgagctgggtccgccaggctccagggaaggggctggagtgggtggccaatgtgaaggaagatggaagtgagaaatactatgtggactctgtgaagggccgattcaccctcaccagagacaacgccaagaacgcactgtttctgcaaatgaacagcctgagagccgaggacacggctgtatattactgtgcgagagattattagcgggtgataaagggggtagtggggggccacaaacaattgaatagtggttattaatattccggcacgcttttgatatctggggccaagggacactggtcaccgtctcttcag

SEQ ID NO: 10249 - DNA, 405 bp, Homo sapiens
caggtgcagttggtgcagtctggggctgaggtgaagaagcctggggcctcagtgaaggtctcctgcaaggcttctggatacatcttcaccgactactttatacactgggtacgacaggcccctggacaagggcttgagtggatgggatggatcaaccctaatagtggtggcacaaagtttgtacagaagtttcagggcagggtcaccatgaccagggacacgtccatcatcacagcctacatggagctgagcaggctgagatctgacgacacggccgtgtattactgtgcgagagataggccgcctttttggagtggttattataccggtccaggaaaaacgacaagctacccctactacggtatggacgtctggggccaagggaccacggtcaccgtctcctca

SEQ ID NO: 10250 - DNA, 352 bp, Homo sapiens
gaggtgcacctggtggagtctgggggaggcttggtaaagcctggggggtcccttagactctcctgtgcagcctctggattcactttcagtaacgcctggatgagctgggtccgccaggctccagggaaggggctggagtgggttggccgtattaaaaccaaaactgatggtgggacaacagactacgctgcacccgtgaaaggcagattcaccatctcaagagatgattcaaaaaacacgctgtatctgcaaatgaacagcctgaaaagcgaggacacagccgtgtattattgtaccaccagtagtacccccgactactggggccagggaaccctggtcaccgtctcctcag

SEQ ID NO: 10251 - DNA, 367 bp, Homo sapiens
caggtgcagctggtggagtctgggggaggcgtggtccagcctgggaggtccctgagactctcctgtgcagcctctggattcaccttcagtagctatgctatgcactgggtccgccaggctccaggcaaggggctggagtgggtggcagttatatcatatgatggaagtaataaatactacgcagactccgtgaagggccgattcaccatctccagagacaattccaagaacacgctgtatctgcaaatgaacagcctgagagctgaggacacggctgtgtattactgtcaaaccgaggatagaaggggttattacccgtggtactttgactactggggccagggaaccctggtcaccgtctcctcag

SEQ ID NO: 10252 - DNA, 337 bp, Homo sapiens
caggtccagctggtacagtctggggctgaggtgaagaagcctggggcctcagtgaaggtctcctgcaaggtttccggatacaccctcactgaattatccatgcactgggtgcgacaggctcctggaaaagggcttgagtggatgggaggttttgatcctgaagatggtgaaacaatctacgcacagaagttccagggcagagtcaccatgaccgaggacacatctacagacacagcctacatggagctgagcagcctgagatctgaggacacggccgtgtattactgtgcaacagatggactctggggccagggaaccctggtcaccgtctcctcag

SEQ ID NO: 10253 - DNA, 345 bp, Homo sapiens
gaggtgcagctgttggagtctgggggaggcttggtacagcctggggggtccctgagactctcctgtgcagcctctggattcacctttagcagctatgccatgagctgggtccgccaggctccagggaaggggctggagtgggtctcaggtattagtggtagtggtggtagcacatactacgcagactccgtgaagggccggttcaccatctccagagacaattccaagaacacgctgtatctgcaaatgaacagcctgagagtcgaggacacggccgtatattactgtgcgaaagactcgcggatggacgtctggggccaagggaccacggtcaccgtctcctca

SEQ ID NO: 10254 - DNA, 402 bp, Homo sapiens
caggtccagctggtacagtctggggctgaggtgaagaagcctggggcctcagtgaaggtctcctgcaaggtttccggatacaccctcactgaattatccatgcactgggtgcgacaggctcctggaaaagggcttgagtggatgggaggttttgatcctgaagatgctgaaacaatctacgcacagaagttccagggcagagtcaccatgaccgaggacacatctacagacacagcctacatggagctgagcagcctgagatctgaggacacggccgtgtattactgtgcagccgccttctctattgttttagtatcaggtgctactctccagagggggaattacaactactactacggtatggacgtctggggccaagggaccacggtcaccgtctcctca

SEQ ID NO: 10255 - DNA, 340 bp, Homo sapiens
caggtgcagttggtggagtctgggggaggcgtggtccagcctgggaggtccctgagactctcctgtgcaggctctggattcagtttcagtagttatggcatgcactgggtccgccaggctccaggcaaggggctggagtgggtggcagttatatcatacgatggaattaataaacattatgcagactccgtgaagggccgattcaccatctccagagacaatttcaagaacacgctgtatctgcaaatgaacagcctgagagctgaggacacggctgtgtacttctgtgcgaaagttgacgactcctggggccagggaaccctggtcaccgtctcctcag

SEQ ID NO: 10256 - DNA, 406 bp, Homo sapiens
cagctgcagctgcaggagtcgggcccaggactggtgaagccttcggagaccctgtccctcacttgcactgtctctggtggctccatcagcagtggtaattactactggggctgggtccgccagcccccagggaaggggctggagtggattgggaatatcttttatagtgggagcacctactacaacccgtccctcaagagtcgagtcaccatatccgtagacacgtccaagaaccagttctccctgaagctgagctctgtgaccgccgcagacacggctgtctattactgtgcgagacgatcttgtagtggtggtaactgctacctgagttctgtatttgtggaggtttcaggccggggcgaatttgactactggggccagggaaccctggtcaccgtctcctcag

SEQ ID NO: 10257 - DNA, 356 bp, Homo sapiens
caggtgcagctgcaggagtcgggcccaggactggtgaagccttcacagaccctgtccctcacctgcactgtctctggtggctccatcagcagtggtggttactactggagctggatccgccagcacccagggaagggcctggagtggattgggtacatctattatagtgggagcacctacttcaagccgtccctcaagagtcgagttaccatatcagtggacacgtctaagaaccagttcttcctgaagctgacctctgtgacagccgcggacacggccgtgtattactgtgcgagaggtgcagcagctggtgactgactattggggccaggaaaccctggtcaccgtctcctcag

SEQ ID NO: 10258 - DNA, 420 bp, Homo sapiens
caggtgcagctggtgcagtctgggtctgaggtgaagaagcctggggcctcagtgaagatttcctgcaaggcatctggatacaccttcaccagctactatatgcactgggtgcgacaggcccctggacaagggcttgagtggatgggaataatcaatcccagtggtggtagtcaaagctacgcacagaagttcaagggcggagtcaccatgaccagggacacgtccacgagcacagtctacatggagctgagcagcctgagaggtgaggacacggccgtgtactactgtgcgagagaggtaggtgggttcggggagttttctgtcccggtggaagatgtgggactgaacaaagccaaggaacaaaaagaaaactacgctatggacgtctggggccaagggaccacggtcaccgtctcctca

SEQ ID NO: 10259 - DNA, 409 bp, Homo sapiens
gaagtgcagctggtggagtctgggggaggctgggtacagcctggcaggtccctgagactctcctgtgcagcctctggattcacctctgatgattatgccatgcactgggtccggcaagctccagggaagggcctggagtgggtctcaggtattagttggaatagtggtgtcctaggctatgcggactctgtgaagggccgattcatcatctccagagacaacgccaagaactccctgtatctccaaatgaacagtctgagaaaagaggacacggccttctattactgtgcaaaagatataggactaggggaggtccctattactatggttcgggaccaccccggccccggggtcgccgagggggcttttgatatctggggccaagggacaatggtcaccgtctcttcag

SEQ ID NO: 10260 - DNA, 408 bp, Homo sapiens
gaggtgcagctggtggagtctgggggaggcttggtaaagcctggggggtcccttagactctcctgtgcagcctctggattcactttcagtaacgcctggatgagctgggtccgccaggctccagggaaggggctggagtgggttggccgtattaaaagcaaaactgatggtgggacaacagactacgctgcacccgtgaaaggcagattcaccatctcaagagatgattcaaaaaacacgctgtatctgcaaatgaacagcctgaaaaccgaggacacagccgtgtattactgtaccacaggtcgggtcctaacgtattactatggttcggggagttattataaggccccctactactactacggtatggacgtctggggccaagggaccacggtcaccgtctcctca

SEQ ID NO: 10261 - DNA, 350 bp, Homo sapiens
gaggtgcagctggtggagtctggaggaggcttgatccagcctggggggtccctgagactctcctgtgcagcctctgggttcaccgtcagtagcaactacatgagctgggtccgccaggctccagggaaggggctggagtgggtctcagttatttatagcggtggtagcacattctacgcagactccgtgaagggccgattcaccatctccagagacaattccaagaacacgctgtatcttcaaatgaacagcctgagagccgaggacacggccgtgtattactgtgcgagagattatggtgggttgcggtttgatatctggggccaagggacaatggtcaccgtctcttc

SEQ ID NO: 10262 - DNA, 367 bp, Homo sapiens
caggtgaagctggtgcagtctggggctgaggtgaagaagcctggggcctcagtgaaggtctcctgcaaggcttctggatacaccttcaccggctactatgtgcactgggtgcgacaggcccctggacaagggcttgagtggatgggatggatcaaccctatcagtggtggcacaaactatgaacggatgtttcagggcagggtcaccatgaccagggacacgtccatcagcacagtctacatggagctgagcaggctgaaatctgacgacacggccgtgtattactgtgcgagagatgcgtggtggtctggtttggggggtagctttgactactggggccagggaaccctggtcaccgtctcctcag

SEQ ID NO: 10263 - DNA, 367 bp, Homo sapiens
caggtgcaactggtgcagtctggggctgaggtgaagaagcctggggcctcagtgaaggtctcctgcaaggcttctggatacaccttcaccggctactatatgcactgggtgcgacaggcccctggacaagggcttgagtggatgggatggatcaaccctaatagtggtggcacaaaatctgcacagaactttcagggcagggtcaccatgaccagggacaggtccatcagcacagcctacatggagctgagtaggctgacatctgacgacacggccgtgtattattgtgcgagagataacggtgactcaattttgttgggctggttcgacccctggggccagggaaccctggtcatcgtctcctcag

SEQ ID NO: 10264 - DNA, 367 bp, Homo sapiens
caggtgcagctggtgcagtctggggctgaggtgaaggagcctggggcctcagtgaaggtctcctgcaaggcttctggatacaccttcaccggctactatatgcactgggtgcgacaggcccctggacaaggacttgagtggatgggatggatcaaccctaacagtggtggcacaaactctgcacagaagtttcagggcagggtcaccatgaccagggacacgtccatcagcacagcctacatggagctgagcaggctgagatctgacgacacggccgtgtattactgtgcgagagtttttacttctacgatttttggagttgggtccgcctactggggccagggaaccctggtcaccgtctcctcag

SEQ ID NO: 10265 - DNA, 367 bp, Homo sapiens
caggtgcagctggtgcagtctggggctgaggtgaagaagcctggggcctcagtgaaggtctcctgcagggcttctggatacaccttcacccactcctatatacactgggtgcgacaggcccctggacaagggcttgagtggatgggatggatcaaccctaacagtggtggcacaaactctacacagaagtttcagggcagggtcaccatgaccagggacaggtccatcagcacagcctacatggagctgagcaggctgagatttgacgacacggccgtctattactgtgcgagagattacggtgactcaattttgttgggatggttcggcccctggggccagggaaccctggtcaccgtctcctcag

SEQ ID NO: 10266 - DNA, 372 bp, Homo sapiens
gaggtgcagctggtggagtctgggggaggcttggtaaagcctggggggtcccttagactctcctgtgcagcctctggattcactttcaataacgcctggatgagctgggtccgccaggctccagggaaggggctggagtgggttggccgtattaaaagcaaaactgatggtggggcaatagactacgctgcacccgtgaaaggcagattcaccatctcaagagatgattcaaaaaatacgctgtatctgcaaatgaacagcctgaaaaccgaggacacagccgtgtattactgtaccacctcggacctactcctctactactcctacggtgtggacgtctggggccaagggaccacggtcaccgtctcctca

SEQ ID NO: 10267 - DNA, 367 bp, Homo sapiens
caggtgcagctggtgcagtctggggctgaggtgaagaagcctggggcctcagtgaaggtctcctgcaaggcttctggatacaccttcaccggcttctatatgcactgggtgcgacaggcccctggacaagggcttgagtggatgggatggatcaaccctaacagtggtggcacaaactatgcacggaagtttcagggcagggtcaccatgaccagggacacgtccatcaccacagccttcatggagctgagcaggctgagcgctgacgacacggccgtgtattactgtgcgagagatctcgatactagtggtctcgggggctggttcgacccctggggccagggaaccctggtcaccgtctcctcag

SEQ ID NO: 10268 - DNA, 367 bp, Homo sapiens
caggtgcagctggtgcagtctggggctgaggtgaagaagcctggggcctcagtgaaggtctcctgcaaggcttctggatacaccttcaccggctactatatgcactgggtgcgacaggcccctggacaagggcttgagtggatgggatggatcaaccctaacagtggtggcacaaactatgcacagaagtttcagggcagggtcaccatgaccagggacacgtccatcagcacagcctacatggagctgagcaggctgagatctgacgacacggccgtgtattactgtgcgagagtttggtttggggcagcagctggtatctactttgactactggggccagggaaccctggtcaccgtctcctcag

SEQ ID NO: 10269 - DNA, 355 bp, Homo sapiens
caggtgcagctggtgcagtctggggctgaggcgaagaagcctggggcctcagtgaaggtttcctgcagggcatctggatacaccttcatctcctactatatgcactgggtgcgacaggcccctggacaaggacttgagtggatgggtataatcacccctagtggtggtggcacagactacgcagagaagttccggggcagagtcaccgtgaccggggacacgtccacgagcactgtctacatggagctgaccagcctgagatctgaggacacggccgtctatttctgtgcgagacaatcgacgcggggtgcttttgatatctggggccaagggacaatggtcaccgtctcttcag

SEQ ID NO: 10270 - DNA, 354 bp, Homo sapiens
caggtgcagctggtgcagtctggggctgaggtgaagaagcctggggcctcagtgaaggtctcctgcaaggcttctggatacaccttcaccggctactatatgcactgggtgcgacaggcccctggacaagggcttgagtggatgggatggatcaaccctaacagtggtggcacaaactatgcacagaagtttcagggcagggtcaccatgaccagggacacgtccatcagcacagcctacatggagctgagcaggctgagatctgacgacacggccgtgtattactgtgcgagagatcgttacactatatggggggacgtctggggccaagggaccacggtcaccgtctcctca

SEQ ID NO: 10271 - DNA, 355 bp, Homo sapiens
gaggtgcaactggtggagtctgggggaggcttggtccagcctggggggtccctgagactctcctgtgcagcctctggattcacctttagtagcttttggatgagctgggtccgccaggctccagggaaggggctggagtgggtggccaacataaagcaagatggaagtgagacatactatgtggactctgtgaagggccgattcaccatctccagagacaacgccaagaactcactgtatctgcaaatgaacagcctgagagccgaggacacggccatatattactgtgcgagagaaggctccggggagtactttgactactggggccagggaacccttgtcaccgtctcctcag

SEQ ID NO: 10272 - DNA, 358 bp, Homo sapiens
cagctgcagctgcaggagtcgggcccaggactggtgaagccttcggagaccctgtccctcacctgcactgtctctggtggctccatcagcagtagtagtcactcctggggctggatccgccagcccccagggaaggggctggagtggattgggagcatccattatagtggaagcacgtactacaacccgtccctgaggagtcgagtcaccatatccgtagacacttccaagaaccagttctccctgaagctgagctctgtgaccgccgcagacacggctgtgtattactgtgcgagacccataactgaaacgacgtttgactactggggccagggaaccctggtcaccgtctcctcag

SEQ ID NO: 10273 - DNA, 351 bp, Homo sapiens
gaggtgcagctggtggagtctggaggaggcttgatccagcctggggggtccctgagactctcctgtgcagcctctgggttcaccgtcagtagcaactacatgagctgggtccgccaggctccagggaaggggctggagtgggtctcagttatttatagcggtggtagcacatactacgcagactccgtgaagggccgattcaccatctccagagacaattccaagaacacgctgtatcttcaaatgaacagcctgagagccgaggacacggccgtgtattactgtgcgagagatagttggggatacggtatggacgtctggggccaagggaccacggtcaccgtctcctca

SEQ ID NO: 10274 - DNA, 366 bp, Homo sapiens
caggtgcagctggtgcagtctggggctgaggtgaagaagcctggggcctcagtgaaggtttcctgcaaggcatctggatacaccttcagcaactactatatgcactgggtgcgacaggcccctggacaagggcttgagtggatgggaataatcaaccctagtgctggtagcacaagctacgcacagaagttccagggcagagtcaccatgaccggggacacgtccacgagcactgtctacatggagctgggcagcctgagatctgaggacacggccgtgtattattgtgcgagagatattgtactaataccagctgctaatgctatggacgtctggggccaagggaccacggtcaccgtctcctca

SEQ ID NO: 10275 - DNA, 351 bp, Homo sapiens
gaggtgcagctggtggagtctggaggaggcttgatccagcctggggggtccctgagactctcttgtgcagcctctggggtcaccgtcagtcgcaactacatgagctgggtccgccaggctccagggaaggggctggagtgcgtctcagttatttatagcggtggtagcacattctacgcagactccgtgaggggccgattcaccatctccagagacaattccaagaacacgctgtttcttcagatgaacagcctgagagccgaggacacggccgtgtattactgtgcgagagatcttgaggaatacggtatggacgtctggggccaagggaccacggtcaccgtctcctca

SEQ ID NO: 10276 - DNA, 370 bp, Homo sapiens
caggtcaccttgagggagtctggtcctgcgctggtgaaacccacacagaccctcacactgacctgcaccttctctgggttctcactcagaactagtggaatgtgtgtgagttggatccgtcagcccccagggaaggccctggagtggcttgcactcattgattgggatgataataaatattacaacacatctctgaagaccaggctcaccatctccaaggacacctccagaaaccaggtggtccttacaatgaccaacatggaccctgtggacacagccacgtattactgtacacggatcgattactatcatagtagtggttatacacttgactactggggccagggaattttggtcaccgtctcctcag

SEQ ID NO: 10277 - DNA, 355 bp, Homo sapiens
caggtgcagctggtgcagtctggggctgaggtgaagaagcctgggtcctcggtgaaggtctcctgcaaggcttctggaggcaccttcagcagctatgctatcagctgggtgcgacaggcccctggacaagggcttgagtggatgggagggatcatccctatctttggtacagcaaactacgcacagaagttccagggcagagtcacgattaccgcggacgaatccacgagcacagcctacatggagctgagcagcctgagatctgaggacacggccgtgtattactgtgcgagatatagtggctacgatggtcttgactactggggccagggaaccctggtcaccgtctcctcag

SEQ ID NO: 10278 - DNA, 355 bp, Homo sapiens
caggtgcagttggtgcagtctggggctgaggtgaagaagcctgggtcctcggtgaaggtctcctgcaaggtttctggaggcaccttcagcacctgtgttatcacctgggtgcgacaggcccctggacaagggcttgagtggatgggagggatcatccctatctttggtacaactaactacgcacagaagttccagggcagagtcacaattaccgcggacgaatccacgggcacagcctacatggaactgagcagcctgagatctgaggacacggccatgtattactgtgtgagacttagccagtgggagctactaccccactggggccagggaaccctggtcaccgtctcctcag

SEQ ID NO: 10279 - DNA, 355 bp, Homo sapiens
caggtgcagctggtgcagtctggggctgaggtgaagaagcctgggtcctcggtgaaggtctcctgcaaggcttctgggggcaccttcagcacctatgttttcagctgggtgcgacaggcccctggacaaggccttgagtggatgggagggatcatccctctctttggtacagcaaactacgcacagaagtttcagggcagagtcacgattaccgcggacgagtccacgagcacagcctacatggagctgagcagcctgagatctgaggacgcggccgtatattactgtgtgagacttagccagtgggagctactagtttactggggcccgggaaccctggtcaccgtctcctcag

SEQ ID NO: 10280 - DNA, 351 bp, Homo sapiens
aggtgcagctggtggactctgggggaggcgtggtccagcctgggaggtccctgagactctcctgtgcagcctctggattcaccttcagtagctatagcatgaactgggtccgccaggctccagggaaggggctggagtgggtctcaattatttatggcggtggtagtacatactacgcggactccgtgaagggccgattcaccatctcccgagacagttccaagaacatggtgtttcttcaaatgaacagcctgagagccgaggacacggccgtgtattactgtgcgagaatgcaggtcaaatacgttaccggggtttggggccagggaaccctggtcaccgtctcctcag

SEQ ID NO: 10281 - DNA, 355 bp, Homo sapiens
gaggtgcagctggtgcagtctggagcagaggtgaaaaagcccggggagtctctgaagatctcctgtaagggttatggatacagctttaccagccactggatcggctgggtgcgccagatgcccgggaaaggcctggagtggatggggatcatctatcctggtgactctgataccagatacagcccgtccttccaaggccaggtcaccatctcagccgacaagtccatcagcaccgcctacttgcagtggagcagcctgaaggcctccgacaccgccatgtattattgtgcgagaatgaccgataggatacaactaggcccctggggccagggagccctggtcaccgtctcctcag

SEQ ID NO: 10282 - DNA, 370 bp, Homo sapiens
caggtgcagctggtgcagtctggggctgaggtgaagaagcctggggcctcagtgaaggtctcctgcaaggcttctggatacaccttcaccggctactatatgcactgggtgcgacaggcccctggacaagggcttgagtggatgggatggatcaaccctaacagtggtggcacaaactatgcacagaagtttcagggcagggtcaccatgaccagggacacgtccatcagcacagcctacatggagctgagcaggctgagatctgacgacacggccgtgtattactgtgcgagagagtatagcagcagctggtacggggaaaactggttcgacccctggggccagggaaccctggtcaccgtctcctcag

SEQ ID NO: 10283 - DNA, 367 bp, Homo sapiens
gaggtgcagctggtggagtctgggggaggcttggtacagcctggggggtccctgagactctcctgtgcagcctctggattcaccttcagtagctacgacatgcactgggtccgccaacctacaggaaaaggtctggagtgggtctcaactattggttctgctggtgacacatactatccaggctccgtgaagggccgattcactatctccagagaaaatgccaagaactccttgtatcttcagatgaacagcctgagagccggggacacggctgtgtattactgtgcaagaggtggctttgatagtagtggtttctacacctggctcgacccctggggccagggaaccctggtcaccgtctcctcag

SEQ ID NO: 10284 - DNA, 358 bp, Homo sapiens
caggtcaccttgagggagtctggtcctgcgctggtgaaacccacacagaccctcacactgacctgcaccttctctggattctcactcagcactagtggaatgtgtgtgagttggattcgtcagcccccagggaaggccctggagtggcttgcactcattgattgggatgatgataaatactacagcacatctctgaggaccaggctcaccatctccaaggacacctccaagaaccaggtggtccttacaatgaccaacatggaccctgtggacacagccacgtattactgtgcacggacagtaagattaaggtggttcgacccctggggccagggaaccctggtcaccgtctcctcag

SEQ ID NO: 10285 - DNA, 355 bp, Homo sapiens
caggtgcagctggtggagtctgggggaggcgtgggccagcctgggaggtccctgagactctcctgtgcagcgtctggattcaccttcagtacctatggcatgcactgggtccgccaggctccaggcaaggggctggagtgggtggcagttatctggtatgatggaagtaataaatattatgcagactccgtgaagggccgattcaccatctccagagacaattccaagaacacactgtacctgcaaatgaacagcctgagagtcgacgacacggctgtatattactgtgcgagcgaggcaactaccgatgcttttgatatctggggccaagggacattggtcaccgtctcttcag

SEQ ID NO: 10286 - DNA, 354 bp, Homo sapiens
gaggtgcagctggtggagtctgggggaggcttggtaaagccagggcggtccctgagactctcctgtacagcttctggattcacctttggtgattatgctatgagctggttccgccaggctccagggaaggggctggagtgggtctcagctattagtggtagtggtggtagcacatactacgcagactccgtgaagggccggttcaccatctccagagacaattccaagaacacgctgtatctgcaaatgaacagcctgagagccgaggacacggccgtgtattactgtgcgagagatagttggggatacggtatggacgtctggggccaagggaccacggtcaccgtctcctca

SEQ ID NO: 10287 - DNA, 370 bp, Homo sapiens
gaagtgcagctggtggagtctgggggaaacttggtacagcctggcaggtccctgagactctcctgtgcagcctctggattcacctttgatgattatgccatgcactgggtccggcaagctccagggaagggcctggagtgggtctcaggtattagttggaatagtgctagcataggctatgcggactctgtgaggggccgattcaccatctccagagacaacgccaagaactccctatatctgcaaatgaacagtctgactactgaggacacggccttgtattattgtgcaaaagaagagttatttggttcggggacttccaactggttcgacccctggggccagggaaccctggtcaccgtctcctcag

SEQ ID NO: 10288 - DNA, 373 bp, Homo sapiens
gaggtgcagctggtggagtctgggggaggcttggtaaagcctggggggtcccttagactctcctgtgcagcctctggattcactttcagtaacgcctggatgagctgggtccgccaggctccagggaaggggctggagtgggttggccgtattaaaagcaaaactgatggtgggacaacagactacgctgcacccgtgaaaggcagattcaccatctcaagagatgattcaaaaaacacgctgtatctgcaaatgaacagcctgaaaaccgaggacacagccgtgtattactgtaccacagaaaggatacagctatggtggggatctgagtacgactactggggccagggaaccctggtcaccgtctcctcag

SEQ ID NO: 10289 - DNA, 358 bp, Homo sapiens
cagatcaccttgaaggagtctggtcctacgctggtgaaacccacacagaccctcacgctgacctgcaccttctctgggttctcactcagcactagtggagtgggtgtgggctggatccgtcagcccccaggaaaggccctggagtggcttgcactcatttattggaatgatgataagcgctacagcccatctctgaagagcaggctcaccatcaccaaggacacctccaaaaaccaggtggtccttacaatgaccaacatggaccctgtggacacagccacatattactgtgcacacaaattcccatagtagtggttacctggctggggccagggaaccctggtcaccgtctcctcag

SEQ ID NO: 10290 - DNA, 358 bp, Homo sapiens
cagatcaccttgaaggagtctggtcctacgctggtgaaacccacacagaccctcacgctgacctgcaccttctctgggttctcactcagcactagtggagtgggtgtgggctggatccgtcagcccccaggaaaggccctggagtggcttgcactcatttattgggatgatgataagcgctacagcccctctctgaagagcaggctcaccatcaccaaggacacctccaaagaccaggtggtcctaacaatgaccaacatggaccctgtggacacagccacatattactgtgcacgtcagcagctgataccgatagttgactactggggccagggaaccctggtcaccgtctcctcag

SEQ ID NO: 10291 - DNA, 370 bp, Homo sapiens
caggtgcagctggtggagtctgggggaggcgtggtccagcctgggaggtccctgagactctcctgtgcagcctctggattcaccttcagtacccttggcatgcactgggtccgccaggctccaggcaaggggctggagtgggtggcagttatatcatatgatggaagttataaatactatacagactccgtgaagggccgattcaccatctccagagacaattccaagaacacgctgtatctgcaaatgaacagcctgagagctgaggacacggctgtttattactgtgcgaaagaggatggtcgaaacgactacatggtgtcctggtttgactcctggggccagggaaccctggtcaccgtctcctcag

SEQ ID NO: 10292 - DNA, 370 bp, Homo sapiens
caggtgcagctggtggagtctgggggaggcgtggtccagcctgggaggtccctgagactctcctgtgcagtctctggattcaccttcactagctattctttgcactgggtccgccaggctccaggcacggggctggagtgggtggcagttatatcatatgatggaaataataaatactacgcagactccgtgaagggccgattcaccatctccagagacaattccaagaacacgctgtatctgcaaatgaacagcctgagagctgaggacacggctgtgtattactgtgcgagagatggaagtgattttgactgggcacctaactggttcgacccctggggccagggaaccctggtcaccgtctcctcag

SEQ ID NO: 10293 - DNA, 370 bp, Homo sapiens
caggtgcagctggtggagtctgggggaggcgtggtccagcctgggaggtccctgagactctcctgtgcagcctctggattcaccttcagtaactatgacatgcactgggtccgccaggctccaggcaaggggctggagtgggtggcagttatatcatatgatggaagtaataaatattatgcagactccgtgaagggccgattcaccatctccagagacaattccaagaacacgctgtatctgcaaatgaacagcctgagagttgaggacacggctgtgtattactgtgcgaaagacggtgctggggatacagctatggtagactggttcgacccctggggccagggaaccctggtcaccgtctcctcag

SEQ ID NO: 10294 - DNA, 331 bp, Homo sapiens
cagtctgttctgactcagccaccctcagcgtctgggacccccgggcagagggtcaccatctcttgttctggaagcaactccaacatcggaagtgatgctgtaaggtggtaccagaagctcccaggaacggcccccaaactcctcatctacagtactaatcagcggccctcaggggtccctgaccgattctctggctccaagtctggcacctcagcctccctggccatcagtgggctccagtctgacgatgaggctgattattactgtgcagcatgggatgccagactaaatggttatgtcttcggaactgggaccaccgtcaccgtcctag

SEQ ID NO: 10295 - DNA, 331 bp, Homo sapiens; identical to SEQ ID NO: 10294

SEQ ID NO: 10296 - DNA, 331 bp, Homo sapiens
cagtctgttctgactcagccaccctcagcgtctgggacccccgggcagagggtcaccatctcttgttctggaagcagctccaacatcggaagtgatgctgtaaggtggtaccagaagctcccaggaacggcccccaaactcctcatctacagtactactcagcggccctcaggggtccctgaccgattctctggctccaagtctggcacctcagcctccctggccatcagtgggctccagtctgacgatgaggctgattattactgtgcagcatgggatgccagactaaatggttatgtcttcggaactgggaccaccgtcaccgtcctag

SEQ ID NO: 10297 - DNA, 331 bp, Homo sapiens
cagtctgttctgactcagccaccctcagcgtctgggacccccgggcagagggtcaccatctcttgttctggaagcagctccaacatcggaagtgatgctgtaaggtggtaccagaagctcccaggaacggcccccaaactcctcatctacagtacttatcagcggccctcaggggtccctgaccgattctctggctccaagtctggcacctcagactccctggccatcagtgggctccggtccgagaatgaggctgattcttattgtgcagcatgtgatgacagcctgagtggtgtgctattcggcggagggaccaacctgaccgtcctag

SEQ ID NO: 10298 - DNA, 331 bp, Homo sapiens; identical to SEQ ID NO: 10294

SEQ ID NO: 10299 - DNA, 322 bp, Homo sapiens
gacatccagatgacccagtctccatcctccctgtctgcatctgtaggagacagagtcagcatcacttgccgggcgagtctggacattagcaattctttagcctggtatcaacataaatcagggaaagcccctaagctcctgctctatgctgcatccagattggaaagtggggtcccgtccaggttcagtggcactggatctgggacggattacactctcaccatcagcagcctgcagcctgaagattttgcaacttattactgtcaacagtattatagcaccctactcactttcggcggagggaccaaggtggagatcaaac

SEQ ID NO: 10300 - DNA, 322 bp, Homo sapiens; identical to SEQ ID NO: 10299

SEQ ID NO: 10301 - DNA, 322 bp, Homo sapiens; identical to SEQ ID NO: 10299

SEQ ID NO: 10302 - DNA, 322 bp, Homo sapiens; identical to SEQ ID NO: 10299

SEQ ID NO: 10303 - DNA, 331 bp, Homo sapiens
caggctgtggtgactcaggagccctcactgactgtgtccccaggagggacagtcactctcacctgtggctccagcactggagctgtcaccagtggtcattatccctactggttccagcagaagcctggccaagcccccaggacactgatttatgatacaagcaacaaacactcctggacccctgcccggttctcaggctccctccttgggggcaaagctgccctgaccctttcgggtgcgcagcctgaggatgaggctgagtattactgcttgctctcctatagtggtgctcggccggtgttcggcggagggaccaagctgaccgtcctag

SEQ ID NO: 10304 - DNA, 331 bp, Homo sapiens; identical to SEQ ID NO: 10303

SEQ ID NO: 10305 - DNA, 331 bp, Homo sapiens; identical to SEQ ID NO: 10303

SEQ ID NO: 10306 - DNA, 331 bp, Homo sapiens; identical to SEQ ID NO: 10303

SEQ ID NO: 10307 - DNA, 322 bp, Homo sapiens
gacatccagatgacccagtctccttccaccctgtctgcatctgttggagacagagtcaccatcacttgccgggccagtcagagctttagtgacttgttggcctggtatcagcagaaaccagggaaaacccctaagctcctgatctatagggcgtctactttacagagtggggtctcgtcaaggttcagcggcagtggatctgggacagaattcactctcaccatcagcagcctgcagcctgatgattttgcaacttattactgccaacagtataatagttattctcggacgttcggccaagggaccaaggtggaaatcaaac

SEQ ID NO: 10308 - DNA, 322 bp, Homo sapiens
gacatccagatgacccagtctccttccaccctgtctgcatctgttggagacagagtcaccatcacttgccgggccagtcagagctttagtgacttgttggcctggtatcagcagaaaccagggaaaacccctaagctcctgatctatagggcgtctactttacagagtggggtctcgtcaaggttcagcggcagtggatctgggacagaattcactctcaccatcagtggcctgcagcctgatgattctgcaacttattactgcctacactataattcttatttcaggacttttggccaggggaccaacctggagatcaaac

SEQ ID NO: 10309 - DNA, 322 bp, Homo sapiens
gacatccagatgacccagtctccttccaccctgtctgcatctgttggagacagagtcaccatcacttgccgggccagtcagagctttagtgacttgttggcctggtatcagcagaaaccagggaaaacccctaagctcctgatctatagggcgtctactttacagagtggggtctcgtcaaggttcagcggcagtggatctgggacagaattcactctcaccatcagcagcctgcagcctgatgattttgcaacttattactgccaacagtataatagttacccgtggacgttcggccaagggaccaaggtggaaatcaaac

SEQ ID NO: 10310 - DNA, 322 bp, Homo sapiens
gacatccagatgacccagtctccttccaccctgtctgcatctgttggagacagagtcaccatcacttgccgggccagtcagagctttagtgacttgttggcctggtatcagcagaaaccagggaaaacccctaagctcctgatctatagggcgtctactttacagagtggggtctcgtcaaggttcagcggcagtggatctgggacagaattcactctcaccatcagcagcctgcagcctgatgattttgcaacttattactgccaacagtataatagttatcggtggacgttcggccaagggaccaaggtggaaatcaaac

SEQ ID NO: 10311 - DNA, 322 bp, Homo sapiens
gacatccagatgacccagtctccttccaccctgtctgcatctttaggagacagagtcaccatcacttgccgggccagtcagagtattgatatctggttggcctggtatcagcagaaaccagggaaagcccctaaactcctgatctatagggcgtctactttacaaagtggggtcgcatcaaggttcagcgccagtggatctgggacagaattctctctctccatcagcagcctgcagcctgatgattctgcaacttattactgccagcagtatcatagttttccgtacacttttggccaggggaccaagctggagatcaaac

SEQ ID NO: 10312 - DNA, 322 bp, Homo sapiens
gacatccagatgacccagtctccttccaccctgtctgcatctttaggagacagagtcaccatcacttgccgggccagtcagagtattgatatctggttggcctggtatcagcagaaaccagggaaagcccctaaactcctgatctatagggcgtctactttacaaagtggggtcgcatcaaggttcagcgccagtggatctgggacagaattctctctctccatcagcagcctgcagcctgatgactctgcaacttattactgccagcagtatcatagttttccgtacacttttggccaggggaccaagctggagatcaaac

SEQ ID NO: 10313 - DNA, 322 bp, Homo sapiens
gacatccagatgacccagtctccttccaccctgtctgcatctttaggagacagagtcaccatcacttgccgggccagtcagagtattagtatctggttggcctggtatcagcagaaaccagggaaagcccctaaactcctgatctatagggcgtctagtttacaaagtggggtcgcatcaaggttcagcgccagtggatctgggacagaattctctctctccatcagcagcctgcagcctgatgattctgcaacttattactgccagcagtatcatagttttccgtacacttttggccaggggaccaagctggagatcaaac

SEQ ID NO: 10314 - DNA, 322 bp, Homo sapiens
gacatccagatgacccagtctccttccaccctgtctgcatctttaggagacagagtcaccatcacttgccgggccagtcagactgttgatatctggttggcctggtatcagcagaaaccagggaaagcccctaaactcctgatctatagggcgtctactttacaaagtggggtcgcatcaaggttcagcgccagtggatctgggacagaattctctctctccatcagcagcctgcagcctgatgattctgcaacttattactgccagcagtatcatagttttccgtacacttttggccaggggaccaagctggagatcaaac

SEQ ID NO: 10315 - DNA, 331 bp, Homo sapiens
cagtctgccctgactcagcctgcctccgtgtctgggtctcctggacagtcgatcaccatctcctgcactggaaccagcagtgatgttgggagttataaccttgtctcctggtaccaacagtacccaggcaaagcccccaaactcattatttatgaagtcaataagcggccctcaggggtttctaatcgcttctctggctccaagtctggcaacacggcctccctgacaatctctgggctccaggctgaggacgaggctgattattactgctgctcatatggaggtagtagtactttggtgttcggcggagggaccaaggtgaccgtcctag

SEQ ID NO: 10316 - DNA, 331 bp, Homo sapiens; identical to SEQ ID NO: 10315

SEQ ID NO: 10317 - DNA, 331 bp, Homo sapiens; identical to SEQ ID NO: 10315

SEQ ID NO: 10318 - DNA, 331 bp, Homo sapiens
cagtctgtgttgacgcagccgccctcagtgtctgcggccccaggacagaaggtcaccatctcctgctctggaagcagctccaacattgggaataattatgtatcctggtaccagcagttcccaggaacagcccccaaactcctcatgtttgaaaattataagcgaccctcagggattcctgaccgattctctggctccaagtctggcacgtcagccaccctgggcatcaccggactccagactggggacgaggccgattattactgcggaacatgggatagcagcctgagtgctggtgtattcggcggagggaccaagctgaccgtcctag

SEQ ID NO: 10319 - DNA, 348 bp, Homo sapiens
caggctgtgctgactcagccgtcttccctctctgcatctcctggagcatcagccagtctcacctgcaccttgcgcagtggcatcaatattaatacctagaggatatactggtaccagcagaagccagggagtcctccccagtatctcctgaggtacaaatcagactcagataagcagcagggctctggagtccccagccgcttctctggatccaaagatgcttcggccaatccagggattttactcatctctgggctccagtctgaggatgaggctgactattattgtatggattggcacgtcagcgctccgtggtattcggcggagggaccaacctgaccgtcctag

SEQ ID NO: 10320 - DNA, 322 bp, Homo sapiens
gacatccagatgacccagtctccatcctccctgtctgcatctgtaggagacagagtcaccatcacttgccaggcgagtcaggacattagaaactatttaaattggtatcagcagaaaccagggaaagcccctaagctcctgatctacgatgcatccaatttggaaacatgggtcccatcaaggttcagtggaagtggatctgggacagattttactttcaccatcagcagcctgcagcctgaagatattgcaacatattactgtcaacagtatgataatctcccgatcaccttcggccaagggacacggctggacattaaac

SEQ ID NO: 10321 - DNA, 318 bp, Homo sapiens
tcctatgagctgactcagccactctcagtgtcagtggccctgggacagacggccacgattccttgtgggggaaacaacattgaaaggaaaaatgtgttttggtaccagcagaagccaggtcaggcccctgtggtggtcatctatagggataccaatcggccctctgggatccctgagcgattctctggctccaattcgggcaacacggccaccctgaccatcagcggagcccaagccggggatgaggctgactatcactgtcaagtgtgggacggcggcactggagtgttcggcggagggaccaagctgaccgtccta

SEQ ID NO: 10322 - DNA, 318 bp, Homo sapiens
tcctatgagctgactcagccactctcagtgtcagtggccctgggacagacggccacgattacttgtgggggaaacaacattgaaaggaaaaatgtgttttggtaccagcagaagccaggtcaggcccctgtggtggtcatctatagggataccaatcggccctctgggatccctgagcgattctctggctccaattcgggcaacacggccaccctgaccatcagcggagcccaagccggggatgaggctgactatcactgtcaagtgtgggacagcggcactggagtgttcggcggagggaccaagctgaccgtccta

SEQ ID NO: 10323 - DNA, 318 bp, Homo sapiens; identical to SEQ ID NO: 10322

SEQ ID NO: 10324 - DNA, 328 bp, Homo sapiens
gaaattgtgttgacgcagtctccaggcaccctgtctttgtctccaggggaaagagccaccctctcctgcagggccagtcagagtgttagcagcagctacttagcctggtaccagcagaaacctggccaggctcccaggctcctcatctatggtgcatccagcagggccactggcatcccagacaggttcagtggcagtgggtctgggacagacttcactctcaccatcagcagactggagcctgaagattttgcagtgtattactgtcagcagtatggtagctcacctccgctcactttcggcggagggaccaaggtggagatcaaac

SEQ ID NO: 10325 - DNA, 331 bp, Homo sapiens
cagtctgtgctgactcagccaccctcagcgtctgggacccccgggcagagggtcaccatctcttgttctggaagcagctccaacatcggaagtaattatgtatactggtaccagcagctcccaggaacggcccccaaactcctcatctataggaataatcagcggccctcaggggtccctgaccgattctctggctccaagtctggcacctcagcctccctggccatcagtgggctccggtccgaggatgaggctgattattactgtgcagcatgggatgacagcctgagtgtcgtggtattcggcggagggaccaagctgaccgtcctag

SEQ ID NO: 10326 - DNA, 328 bp, Homo sapiens; identical to SEQ ID NO: 10324

SEQ ID NO: 10327 - DNA, 325 bp, Homo sapiens
gacatccagatgacccagtctccatcctccctgtctgcatctataggagacagagtcaccatcacttgccgggcaagtcagagcattagcagctttttaaattggtatcagcagaaaccagggaaagcccctaagctcctgatctatgctgcttccaatttgcaaagtggggtcccatcaaggttcagtggcagtggatctgggacagatttcactctcaccatcagcagtctgcaacctgaggattttgcaacttactactgtcagcagagttacagttcccctccgtggaccttcggccaagggaccaaggtggaaatcaaac

SEQ ID NO: 10328 - DNA, 325 bp, Homo sapiens
tcctatgagctgacacagccaccctcggtgtcagtgtccccaggacaaacggccaggatcacctgctctggagatgcattgccaaaaaaatatgcttattggtaccagcagaagtcaggccaggcccctgtgctggtcatctatgaggacaccaagcgaccctccgggatccctgagagattctctggctccagctcagggacaatggccaccttgactttcagtggggcccaggtggaggatgaagctgactactactgttcctcaacagactccagtggtaatcacagggtgttcggcggagggaccaagctgaccgtcctag

SEQ ID NO: 10329 - DNA, 325 bp, Homo sapiens
tcctatgagctgacacagccaccctcggtgtcagtgtccccaggacaaacggccaggatcacctgctctggagatgcattgccaagaaaatatgcttattggtaccagcagaagtcaggccaggcccctgtgctggtcatctatgaggacaacaaacgaccctccgggatccctgagagagtctctggctccagctcagggacaatggccaccttgactatcagtggggcccaggtggaggatgaagctgactactactgttactccacagacagcagtggtaatcattgggtattcggcggagggaccaagctgaccgtcctag

SEQ ID NO: 10330 - DNA, 322 bp, Homo sapiens
gaaattgtgttgacgcagtctccaggcaccctgtctttgtctccaggggaaagagccaccctctcctgcagggccagtcagagtgttagcagcagctacttagcctggtaccagcagaaacctggccaggctcccaggctcctcatctatggtgcatccagcagggccactggcatcccagacaggttcagtggcagtgggtctgggacagacttcactctcaccatcagcagactggagcctgaagattttgcagtgtattactgtcagcagtatggtagctcacggacgttcggccaagggaccaaggtggaaatcaaac

SEQ ID NO: 10331 - DNA, 322 bp, Homo sapiens; identical to SEQ ID NO: 10330

SEQ ID NO: 10332 - DNA, 322 bp, Homo sapiens; identical to SEQ ID NO: 10330

SEQ ID NO: 10333 - DNA, 322 bp, Homo sapiens
gacatccagatgacccagtctccttccaccctgtctgcatctgtaggagacagagtcaccatcacttgccgggccagtcagagtattagtagctggttggcctggtatcagcagaaaccagggaaagcccctaagctcctgatctataaggcgtctagtttagaaagtggggtcccatcaaggttcagcggcagtggatctgggacagaattcactctcaccatcagcagcctgcagcctgatgattttgcaacttattactgccaacagtataatagttatacgtggacgttcggccaagggaccaaggtggaaatcaaac

SEQ ID NO: 10334 - DNA, 321 bp, Homo sapiens
gacatccagatgacccagtctccttccaccctgtctgcatctgtaggagacagagtcaccatcacttgccgggccagtcagagtattagtagctggttggcctggtatcagcagaaaccagggaaagcccctaagctcctgatctataaggcgtctagtttagaaagtggggtcccatcaaggttcagcggcagtggatctgggacagaattcactctcaccatcagcagcctgcagcctgatgattttgcaacttattactgccaacaatataataattataggtggacgttcggccaagggaccaaggtggaaatcaaa

SEQ ID NO: 10335 - DNA, 321 bp, Homo sapiens; identical to SEQ ID NO: 10334

SEQ ID NO: 10336 - DNA, 328 bp, Homo sapiens
gaaattgtgttgacgcagtctccaggcaccctgtctttgtctccaggggaaagagccaccctctcctgcagggccagtcagagtattagcagcagctacttagcctggtaccagcagaaacctggccaggctcccaggctcctcatctatggtgcatccagcagggccactggcatcccagacaggttcagtggcagtgggtctgggacagacttcactctcaccatcaccagactggagcctgaagattttgcaatgtattactgtcagcattatggtagctcacctccgatcactttcggccctgggaccaaagtggatgtcaaac

SEQ ID NO: 10337 - DNA, 331 bp, Homo sapiens
cagtctgtgctgactcagccaccctcagcgtctgggacccccgggcagagggtcaccatctcttgttctggaagcaactccaacatcggaattaattatgtatactggtaccaccaactcccaggaacggcccccaaactcctcatctataggaataatcagcggccctcaggggtccctgaccgattctctggctccaagtctggcacctcagcctccctggccatcagtgggctccggtccgaggatgaggctgattattactgtacaacgtgggatgacagcctgagtgcttgggtgttcggcggtgggaccaagctgaccgtcctag

SEQ ID NO: 10338 - DNA, 328 bp, Homo sapiens; identical to SEQ ID NO: 10336

SEQ ID NO: 10339 - DNA, 328 bp, Homo sapiens
gaaattgtgttgacacagtctccagccaccctgtctttgtctccaggggaaagagccaccctctcctgcagggccagtcagagtgttagcagctacttagcctggtaccaacagaaacctggccaggctcccaggctcctcatctatgatgcatccaacagggccactggcatcccagccaggttcagtggcagtgggtctgggacagacttcactctcaccatcagcagcctagagcctgaagattttgcagtttattactgtcagcagcgtagcaactggcctccggtgtacacttttggccaggggaccaagctggagatcaaac

SEQ ID NO: 10340 - DNA, 328 bp, Homo sapiens; identical to SEQ ID NO: 10339

SEQ ID NO: 10341 - DNA, 328 bp, Homo sapiens; identical to SEQ ID NO: 10339

SEQ ID NO: 10342 - DNA, 328 bp, Homo sapiens
cagtctgccctgactcagcctgcctccgtgtctgggtctcctggacagtcgatcaccatctcctgcactggaaccagcagtgatgttgggagttataaccttgtctcctggtaccaacaacacccaggcaaagcccccaaactcatgatttatgaggtcagtgagcggccctcaggggtttctaatcgcttctctggctccaagtctggcaacacggcctccctgacaatctctgggctccaggctgaggacgaggctgattattactgctgctcatatgcaggtagtagcactgtggtattcggcggagggaccaagctgaccgtcc

SEQ ID NO: 10343 - DNA, 331 bp, Homo sapiens
cagtctgccctgactcagcctgcctccgtgtctgggtctcctggacagtcgatcaccatctcctgcactggaaccagcagtgatgttgggagttataaccttgtctcctggtaccaacaacacccaggcaaagcccccaaactcatgatttatgaggtcagtgagcggccctcaggggtttctaatcgcttctctggctccaagtctggcaacacggcctccctgacaatctctgggctccaggctgaggacgaggctgattattactgctgctcatatgcaggtagtagcactgtggtattcggcggagggaccaagctgaccgtcctag

SEQ ID NO: 10344 - DNA, 328 bp, Homo sapiens; identical to SEQ ID NO: 10342

SEQ ID NO: 10345 - DNA, 322 bp, Homo sapiens
gacatccagttgacccagtctccatccttcctgtctgcatctgtaggagacagagtcaccatcacttgccgggccagtcagggcattagcagttatttagcctggtatcagcaaaaaccagggaaagcccctaagctcctgatctatgctgcatccactttgcaaagtggggtcccctcaaggttcagcggcagtggatctgggacagaattcactctcacaatcagcagcctgcagcctgaagattttgcaacttattactgtcagcttcttaatagttaccctccggagttcggccaagggaccaaggtggaaatcaaac

SEQ ID NO: 10346 - DNA, 319 bp, Homo sapiens
gacatccagttgacccagtctccatccttcctgtctgcatctgtaggagacagagtcaccatcacttgccgggccagtcagggcattagcacttatttagcctggtatcagcaaaaaccagtgaaagcccctaagctcctgatctatgctgcatccactttgcaaagtggggtcccatcaaggttcagcggcagtggatctgggacagaattcactctcacaatcagcagcctgcagcctgaagattttgcaacttattactgtcaacaccttaataattacccccttttcggcggagggaccaaggtggagatcaaac

SEQ ID NO: 10347 - DNA, 325 bp, Homo sapiens
gacatccagttgacccagtctccatccttcctgtctacatctgtaggagacagagtcaccatcacttgccgggccggtcagggcattagcagttatttagcctggtatcagcaaaaaccagggaaagcccctaagctcctgatctatgctgcatccactttgcaaagtggggtcccatcaaggttcagcggcagtggatctgggacagaattcactctcacaatcagcagcctgcagcctgaagattttgcaacttattactgtcaacaccttaatagttaccctcccatcaccttcggccaagggacacgactggagattaaac

SEQ ID NO: 10348 - DNA, 322 bp, Homo sapiens
gccatccagatgacccagtctccatcctccctgtctgcatctgtaggagacagagtcaccatcacttgccgggcaagtcagggcattagaaatgatttaggctggtatcagcagaaaccagggaaagcccctaagctcctgatctatgctgcatccagtttacaaagtggggtcccatcaaggttcagcggcagtggatctggcacagatttcactctcaccatcagcagcctgcagcctgaagattttgcaacttattactgtctacaagattacaattaccctctcactttcggcggagggaccaaggtggagatcaaac

SEQ ID NO: 10349 - DNA, 322 bp, Homo sapiens
gacatccagatgacccagtctccttccaccctgtctgcatctgtcggagacagagtcaccatcacttgccgggccagtcacaatattggtacctggttggcctggtatcagcagaaaccagggaaagcccctaagctcttgatctgtaaggcatctagtttagaaagtggggtcccgtcaaggttcagcggcagtggatctgggacagaattcactctcaccatcaacagcctgcagcctgatgattttgcaacttattactgccaacagtataatagtcattcgtacacttttggccaggggaccaagctggagatcaaac

SEQ ID NO: 10350 - DNA, 325 bp, Homo sapiens
gaaattgtgttgacgcagtctccaggcaccctgtctttgtctccaggggaaagagccaccctctcctgcagggccagtcagagtgttagcagcacctacttagcctggtaccagcagaaacctggccaggctcccaggctcctcatctatggtgcatccagcagggccactggcatcccagacaggttcagtggcagtgggtctgggacagacttcactctcaccatcagcagactggagcctgaagattttgcagtgtattactgtcagcagtatggtacctcaccattcactttcggccctgggaccaaagtggatatcaaac

SEQ ID NO: 10351 - DNA, 325 bp, Homo sapiens
gaaattgtgttgacgcagtctccaggcaccctgtctttgtctccaggggaaagagtcaccctctcctgcagggccagtcagagtgttaggagcagctacttagcctggtaccagcagaaacctggccaggctcccaggctcctcatctatgctgcatccagcagggccactggcatcccagacaggttcagtggcagtgggtctgggacagacttcactctcaccatcaccagactggagcctgaggattttgcagtgtattactgtcagcagtatgatagctcaccattcactttcggccctgggaccaaagtggatatcaaac

SEQ ID NO: 10352 - DNA, 322 bp, Homo sapiens
gaaattgtgttgacgcagtctccaggcaccctgtctttgtctccaggggaaagagccaccctctcctgcagggccagtcagagtgttagcagcagctacttagcctggtaccagcataaacctggccaggctcccaggctcctcatctatggtgcatccagcagggccactggcatcccagacaggttcagtggcagtgggtctgggacagacttcactctcaccatcagcagactggagcctgaagattttgcagtgtattactgtcaccggtatggtagctggatcaccttcggccaagggacacgactggagattaaac

SEQ ID NO: 10353 - DNA, 322 bp, Homo sapiens
gaaattgtgttgacgcagtctccaggcaccctgtctttgtctccaggggaaagagccaccgtctcctgcagggccagtcagactattagcagcagccacttagcctggtaccagcagaaacctggccaggctcccaggctcctcatctttggtgcatccagcagggccactggcatcccagacaggttcagaggcagtgggtctgggacagacttcactctcaccatcagcagactggagcctgaagattttgcactgtattactgtcagcagtatggtagctggatcaccttcggccaagggacacgactggagattaaac

SEQ ID NO: 10354 - DNA, 322 bp, Homo sapiens
gacatccagatgacccagtctccttccaccctgtctgcatctgtaggagacagagtcaccatcacttgccgggccagtcagagtattaatagctggttggcctggtatcagcagaaaccagggaaagcccctaagctcctgatctatacggcgtctagtttagaaagtggggtcccatcaaggttcagcggcagtggatctgggacagaattcactctcaccatcagcagcctgcagcctgatgattttgcaacttattactgccaacagtataatagttacccgtggacgttcggccaagggaccaaggtggaaatcaaac

SEQ ID NO: 10355 - DNA, 322 bp, Homo sapiens
gacatccagatgacccagtctccttccaccctgtctgcatctgtaggagacagagtcaccatcacttgccgggccagtcagagtattagtagctggttggcctggtatcagcagaaaccagggaaagcccctaaactcctgatctataaggcgtctagtttagaaagtggggtcccatcaaggttcagcggcagtggatctgggacagagttcactctcaccatcagcagcctgcagcctgatgattttgcaacttattactgccaacagtataatagttacccgtggacgttcggccaagggaccaaggtggaaatcaaac

SEQ ID NO: 10356 - DNA, 322 bp, Homo sapiens
gacatccagatgacccagtctccttccaccctgtctgcatctgtaggagacagagtcaccatcacttgccgggccagtcagagtattagtagctggttggcctggtatcagcagaaaccagggaaagcccctaagctcctgatctataaggcatctagtttagaaagtggggtcccatcaaggttcagcggcagtggatctgggacagaattcactctcaccatcagcagcctgcagcctgatgattttgcaacttattactgccaacagtataatagttacttgtacacttttggccaggggaccaagctggagatcaaac

SEQ ID NO: 10357 - DNA, 322 bp, Homo sapiens; identical to SEQ ID NO: 10356

SEQ ID NO: 10358 - DNA, 322 bp, Homo sapiens
gacatccagatgacccagtctccatcctcactgtctgcatctgtaggagacagagtcaccatcacttgtcgggcgagtcagggcattagcaattatttagcctggtttcagcagaaaccagggaaagcccctaagtccctgatctatgctgcatccagtttgcaaagtggggtcccatcaaagttcagcggcagtggatctgggacagatttcactctcaccatcagcagcctgcagcctgaagattttgcaacttattactgtcaacagtattatagtacccctccgacgttcggccaagggaccaaggtggaaatcaaac

SEQ ID NO: 10359 - DNA, 322 bp, Homo sapiens; identical to SEQ ID NO: 3968

SEQ ID NO: 10360 - DNA, 330 bp, Homo sapiens
cagtctgccctgactcagcctgcctccgtgtctgggtctcctggacagtcggtcaccatctcctgcactggaaccagcagtgacgttggtgcttataactatgtctcctggtaccaacagcacccaggcaaagcccccaaactcatgatttatgatgtcagtaatcggccctcaggggtttctgatcgcttctctggctccaagtctggcaacacggcctccctgaccatctctgggctgcaggctgaggacgaggctgattattactgctactcatatacaaccagcagaactcgactcttcggaactgggaccaaagtcaccgtccta

SEQ ID NO: 10361 - DNA, 339 bp, Homo sapiens
gatattgtgatgacccagactccactctctctgtccgtcacccctggacagtcggcctccatctcctgcaagtctagtcagagcctcctgtatagtgatggaaagacctatttgtattggtacctgcagaagccaggccagtctccacagctcctgatctgtgaagtttccagccggttctctggagtgccagataggttcagtggcagcgggtcagggacagatttcacactgaaaatcagccgggaggaggctgaggatgttggggtttagcactgaatgcaaggtgcacaccttcgtcggtcaccttcggccaagggacacgactggagattaaac

SEQ ID NO: 10362 - DNA, 319 bp, Homo sapiens
gacatccagatgacccagtctccatcctccctgtctgcatctgtaggagacagagtcaccatcacttgccgggcaagtcagagcattaggaaccatttaaattggtatcagcagaaaccagggaaagcccctaagctcctgatctatgctgcatccagtttgcaaagtggggtcccatcaaggttcagtggcggtggatctgggacagatttcactctcaccattagcagtctgcaacctgaagattttgcaacttactactgtcaacagagttacagtggccggacgttcggccaagggaccaaggtggaaatcaaac

SEQ ID NO: 10363 - DNA, 355 bp, Homo sapiens
gacatccagatgacccagtctccatcctccctgtctgcatctgtaggggacagagtcaccatcacttgccgggcgagtcaggacgttagcaattatttagcctggtatcagcagaaaccagggaaagctcctaaactcctgatctatgctgcatccactttgcaatcaggggtcccatctcggttcagtggcagtggatctgggacagatttcactctcaccatcagcagcctgcagcctgaagatgctacaacttattactgtcaaagatatagcagtgcccctcgagacgatcggccaagggacccagtgcccctcgagacgttcggccaagggaccaaggtgaaaatcaaac

SEQ ID NO: 10364 - DNA, 325 bp, Homo sapiens
gacatccagatgacccagtctccatcctccctgtctgcatctgtaggagacagagtcaccatcacttgccgggcgagtcagggcattaccaattctttagcctggtatcagcagaagccagggaaagcccctaagctcctgctctatgctgcatccaggttggaaagtggggtcccatccaggttcagtggcagtggatctgggacggattacactctcaccatcagcagcctgcagcctgaagattttgcaacttattactgtcaacagtattatagtagtctttcgcgcactttcggcggagggaccaaggtggagatcaaac

SEQ ID NO: 10365 - DNA, 325 bp, Homo sapiens
gacatccagatgacccagtctccatcctccctgtctgcatctgtgggagacagagtcaccatcacttgccgggcgagtcagggcattagcaattctttagcctggtatcagcagaaaccagggaaagcccctaagctcctgctctatgttgcatccagattggaaagtggggtcccatccaggttcagtggcagtggatctgggacggaatacactctcaccatcagcagcctgcagcctgaagattttgcaacttattactgtcaacagtattatagtaccctttcgcgcactttcggcggagggaccaaggtggagatcaaac

SEQ ID NO: 10366 - DNA, 331 bp, Homo sapiens
cagtctgtgttgacgcagccgccctcagtgtctgcggccccaggacagaaggtcaccatctcctgctctggaagcagctccaacattgggaataattatgtatcctggtaccagcagctcccaggaacagcccccaaactcctcatttatgacaataataagcgaccctcagggattcctgaccgattctctggctccaagtctggcacgtcagccaccctgggcatcaccggactccagactggggacgaggccgattattactgcggaacatgggatagcagcctgagtgcttatgtcttcggaactgggaccaaggtcaccgtcctag

SEQ ID NO: 10367 - DNA, 325 bp, Homo sapiens
tcctatgtgctgactcagccaccctcggtgtcagtggccccaggaaaaacggccaggattacctgtggggaaaacaacattggaagtaaaagtgtgcactggtaccagcagaagccaggccaggcccctgtgccggtcgtctatgatgatagcgaccggccctcagggatccctgagcgattctctggctccaactctgggaacacggccaccctgaccatcagcagggtcgaagccggggatgaggccgactattactgtcaggtgtggggtagtggtagtgatcctgtggtcttcggcggagggaccaagctgaccgtcctag

SEQ ID NO: 10368 - DNA, 331 bp, Homo sapiens
cagtctgagctgacgcagccgccctcagtgtctgcggccccaggacagaaggtcaccatctcctgctctggaagcagctccaacattgggaagaattatgcatcttggtaccagcaactcccaggaacagcccccaaactcctcatccatgaaaataataaacgaccctcagggattcctgaccgattctctggctccaagtctggcacgtcagccaccctgggcatcaccggactccagactggggacgaggccgattattactgcggagcatgggatagcagcctgaatggttgggtgttcggcggagggaccaagctgaccgtcctag

SEQ ID NO: 10369 - DNA, 331 bp, Homo sapiens; identical to SEQ ID NO: 10368

SEQ ID NO: 10370 - DNA, 331 bp, Homo sapiens
cagtctgccctgactcagcctgcctccgtgtctgggtctcctggacagtcgatcaccatctcctgcactggaaccagcagtgacgttggtgattataagtatgtctcctggcaccaacaacacccaggcaaagcccccaaactcatgatttatgatgtcagtaatcggccctcaggggtttctaatcgcttctctggctccaagtctggcaacacggcctccctgaccatctctgggctccaggctgaggacgaggctgattattactgcagctcatataccagcaacaacactgtggtattcggcggagggaccaagctgaccgtcctag

SEQ ID NO: 10371 - DNA, 331 bp, Homo sapiens
cagtctgccctgactcagcctgcctccgtgtctgggtctcctggacagtcgatcaccatctcctgcactggaaccagcagtgacgttggtagttataagtatgtctcctggcaccaacagcacccaggcaaagcccccaaactcatgatttatgatgtcagtaatcggccctcaggggtttctgatcgcttctctggctccaagtctggcaacacggcctccctgaccatctctgggctccaggctgaggacgaggctgattattactgcagctcgtataccagcaacaacactgtggtcttcggcggagggaccaagctgaccgtcctag

SEQ ID NO: 10372 - DNA, 331 bp, Homo sapiens
cagtctgccctgactcagcctccctccgcgtccgggtctcctggacagtcggtcaccatctcctgcactggaaccagcagtgacattggtggttatgactatgtctcctggtaccaacagcaccccggcaaagcccccaaactcctcatttatgaggtcattaagcgcccctcaggggtccctgatcgcttctctggctccaagtctggcaacacggcctccctgaccgtctctgggctccagggtgacgatgaggctgattattactgcagctcatatgcaggcagcacccatgtcattttcggcggagggaccaacctgaccgtcctag

SEQ ID NO: 10373 - DNA, 331 bp, Homo sapiens
cagtctgccctgattcagcctccctccgtgtccgggtctcctggacagtcggtcaccatctcctgcactggaaccagcagtgacgttggtgattataactttgtctcctggtaccagcaacacccaggcaaagcccccaaactcatgatttatgaagtcagtaggcgcccctcaggtgtccctgatcggttctctggctccaagtctggcaacacggcctccctgaccgtctctgggctccaggctgacgatgaggctatttattactgcagctcatatgcaggcagcacccatgtggttttcggcggagggaccaacctgaccgtcctag

SEQ ID NO: 10374 - DNA, 331 bp, Homo sapiens; identical to SEQ ID NO: 8208

SEQ ID NO: 10375 - DNA, 331 bp, Homo sapiens; identical to SEQ ID NO: 8208

SEQ ID NO: 10376 - DNA, 337 bp, Homo sapiens
gacatcgtgatgacccagtctccagactccctggctgtgtctctgggcgagagggccaccatcaactgcaagtccagccagaatcttttatatagttccaataataagaactacttagcttggttccagcagaaaccaggacagtctcctaagctgctcatttactgggcatcaacccgggaatccggggtccctgaccgattcagtggcagcgggtctgggacagatttcactctcaccatcagcagcctgcaggctgaagatgtggcagtttattactgtcagcaatattatagtagtccgtggacgttcggccaagggaccaaggtggaaatca

SEQ ID NO: 10377 - DNA, 337 bp, Homo sapiens; identical to SEQ ID NO: 10376

SEQ ID NO: 10378 - DNA, 334 bp, Homo sapiens
cagcttgtgctgactcaatcgccctctgcctctgcctccctgggagcctcggtcaagctcacctgcactctgagcagtgggcacagcagctacgccatcgcatggcatcagcagcagccagagaagggccctcggtacttgatgaagcttaacagtgatggcagccacagcaagggggacgggatccctgatcgcttctcaggctccagctctggggctgagcgctacctcaccatctccagcctccagtctgaggatgaggctgactattactgtcagacctggggcactggcattgtggtattcggcggagggaccaagctgaccgtcctag

SEQ ID NO: 10379 - DNA, 334 bp, Homo sapiens; identical to SEQ ID NO: 10378

SEQ ID NO: 10380 - DNA, 322 bp, Homo sapiens
gacatccagatgacccagtctccatcctccctgtctgcatctgtaggagacagagtcaccatcacttgccgggcgagtcagggcattagcaattctttagcctggtatcagcagaaaccagggaaagcccctaagctcctgctctatgctgcatccagattggaaagtggggtcccatccaggttcagcggcagtggatctgggacggattacactctcaccatcagcagcctgcagcctgaagattttgcaagttattactgtcaacaatattatgataccccgtggacgttcggccaagggaccaaggtggaaatcaaac

SEQ ID NO: 10381 - DNA, 322 bp, Homo sapiens; identical to SEQ ID NO: 10380

SEQ ID NO: 10382 - DNA, 325 bp, Homo sapiens
tcctatgagctgacacagccaccctcggtgtcagtgtccccaggacaaacggccaggatcacctgctctggagatgcattgccaagaaaatattcttattggttccagcagaagtcaggccaggcccctgtgctggtcatctatgaggacaacaaacgaccctccgggatccctgagagattctctggctccagctcagggacaatggccaccttgactatcagtggggcccaggtggaggatgaagctgactactactgttactcaacagacagcagtggtaatcattgggtcttcggcggagggaccaagctgaccgtcctag

SEQ ID NO: 10383 - DNA, 325 bp, Homo sapiens
tcctacgagctgacacagccaccctcggtgtcagtgtccccaggacaaacggccaggatcacctgctctggagatgcattgccaaaaaaatatgcttattggttccagcagaagtcaggccaggcccctgtgttggtcatctatgaagacagcaaacgaccctccgcgatccctgagagattctctggctccagctcagggacaatggccaccttgactatcagtggggcccaggtggaggatgaagctgactactactgttactcaacagacagcagtggtaatcattgggtgttcggcggagggaccaagctgaccgtcctag

SEQ ID NO: 10384 - DNA, 337 bp, Homo sapiens
cagtctgtgctgacgcagccgccctcagtgtctggggccccagggcagagggtcaccatctcctgcactgggagcagctccaacatcggggcgggttatgatgtacactggtaccagcagcttcccggcacagcccccaaagtcctcatctatggtaacaacgagcggccctcaggggtccctgaccgattctctggctccaagtctggcacctcagcctccctggccatcactgggctccaggctgaggatgaggctgattattattgtcagtcctatgacagcagcctgagtggttcgaaggtgttcggcggggggaccaagctgaccgtcctag

SEQ ID NO: 10385 - DNA, 337 bp, Homo sapiens
cagtctgtgctgacgcagccgccctcagtgtctggggccccagggcagagggtcaccatctcctgcactgggagcagctccaacatcggggcgggttatgatgtacactggtaccagcagcttcccggaacagcccccaaagtcctcatctatggtaacaacgagcggccctcaggggtccctgaccgattctctggctccaagtctggcacctcagcctccctggccatcactgggctccaggctgaggatgaggctgattattactgccagtcctatgacagcagcctgagtggttcgaaggtgttcggcggagggaccaagctgaccgtcctag

SEQ ID NO: 10386 - DNA, 328 bp, Homo sapiens
gaaattgtgttgacgcagtctccaggcaccctgtctttgtctccaggggaaagagccaccctctcctgcagggccagtcagagtgttagcagcacctacttagcctggttccagcagaaacctggccaggctcccaggctcctcatctatgctgcatccagcagggccactggcatcccagacaggttcagtggcagtgggtctgggacagacttcactctcaccatcagcagactggagcctgaagattttgcagtgtattactgtcagcagtatggtagctcacttacgtggacgttcggccaagggaccaaggtggaaatcaaac

SEQ ID NO: 10387 - DNA, 325 bp, Homo sapiens
gacattgtattgacgcagtctccaggcaccctgtctttgtctccaggggaaagagccaccctctcctgcagggccagtcagagtgttaacaacatctacttagcctggtaccagcagaaagctggccaggcgcccaggctcctcatctatgctgcatccagcagggccactggcatcccagacaggttcagtggcagtgggtctgggacagacttcactctcaccatcaacagactggagcctgaagattttgcagtgtattactgtcagcagtatggtagctcaccgtggacgttcggccaagggaccaaggtggaaatcaaac

SEQ ID NO: 10388 - DNA, 335 bp, Homo sapiens
cagtctgccctgactcagcctgcctccgtgtctgggtctcctggacagtcgatcaccatctcctgcactggaaccagcagtgacgttggtagttataactatgtctcctggtaccaacaacacccaggcaaagcccccaaactcatgatttatgatgtcagtagtcggccctcaggggtttctaatcgcttctctggctccaagtctggcaacacggcctccctgaccatctctgggctccaggctgaggacgaggctgattattactgcagctcatataccagcagcagcactctcgatgtggtattcggcggagggaccaagctgaccgtcct

SEQ ID NO: 10389 - DNA, 325 bp, Homo sapiens
tcctatgtgctgactcagccaccctcagtgtcagtggccccaggaaagacggccaggattacctgtgggggaaacaacattggaggtaaaagtgtacactggtaccagcagaagccaggccaggcccctgtgctggtcatctattatgatagcgaccggccctcagggatccctgagcgattctctggctccaactctgggaacacggccaccctgaccatcagcagggtcgaagccggggatgaggccgactattactgtcaggtgtgggatagtagtagtgatcatgtggtattcggcggagggaccaagctgaccgtcctag

SEQ ID NO: 10390 - DNA, 334 bp, Homo sapiens
cagtctgccctgactcagcctgcctccgtgtctgggtctcctggacagtcgatcaccatctcctgcactggagccagcagtgacgttggtaattattactatgtctcctggtaccaacatcacccaggcaaagcccccaaactcatgatttatgatgtcaatgaacggccctcaggggtttctaatcgcttctctggctccaagtctggcaacacggcctccctgaccatctctgggctccaggctgaggacgaggctgattattactgcagctcatatacaagcagcagcaccctttttgtcttgggaactgggaccaaggtcaccgtcctag

SEQ ID NO: 10391 - DNA, 331 bp, Homo sapiens; identical to SEQ ID NO: 10315

SEQ ID NO: 10392 - DNA, 325 bp, Homo sapiens
tcctatgtgctgactcagccaccctcagtgtcagaggccccaggaagggcggccaggattacctgtgggggaaacaacattggaagtaaaagtgtgcactggtaccagcagaagccaggccaggcccctgtggtggtcatctattatgatagcgaccggccctcagggatccctgagcgattctctggctccaactctgggaacacggccaccctgagcatcagcagggtcgaagtcggggatgaggccgactattactgtcaggtgtgggatagtagtagtgatcgtgtggtattcggcggagggaccaagctgaccgtcctag

SEQ ID NO: 10393 - DNA, 325 bp, Homo sapiens
tcctatgtgctgactcagccaccctcagtgtcagtggccccaggaaagacggccaggattacctgtgggggaaacaacattggaagtaaaagtgtgcactggtaccagcagaagccaggccaggcccctgtgctggtcatctattatgatagcgaccggccctcagggatccctgagcgattctctggctccaactctgggaacacggccaccctgaccatcagcagggtcgaagccggggatgaggccgactattactgtcaggtgtgggatagtagtagtgatcgtgtggtattcggcggagggaccaagctgaccgtcctag

SEQ ID NO: 10394 - DNA, 322 bp, Homo sapiens
tcctatgtgctgactcagccaccctcagtgtcagtggccccaggaaagacggccaggattacctgtgggggagacaacattggaactaaaagtgtgcactggtaccagcagaagccaggccaggcccctgtactggtcatctattttgatagcgaccggccctcagggatccctgagcgattctctggctccaactctgggaacacggccaccctgaccatcagcagggtcgaagccggggatgaggccgactattactgtcaggtgtgggatagtagtagtgatcatgtcttcggaactgggaccaaggtcaccgtcctag

SEQ ID NO: 10395 - DNA, 322 bp, Homo sapiens
tcctatgtgctgactcagccaccctcagtgtcagtggccccaggaaagacggccaggattacctgtgtgggagacaacattggaactcaaagtgtgcactggtaccagcagaagccaggccaggcccctatgctggtcatctattttgatagcgaccggccctcagggatccctgagcgattctctggctccaactctgggaacacggccaccctgaccatcagcagggtcgaagccggggatgaggccgactattactgtcaggtgtgggatagtagtagtgatcatgtcttcggaactgggaccaaggtcaccgtcctag

SEQ ID NO: 10396 - DNA, 332 bp, Homo sapiens
cagtctgtgttgacgcagccgccctcagtgtctggggccccagggcagagggtcaccatctcctgcactgggagcagctccaacgtcggggcaggttctgatgtgcactggtaccagcaccttccaggaacaggccccaaactcctcatctccgctataaacaatcggccctcaggggtccctgaccgattctctggctccaagtctggcacctcagcctccctggccatcactgggctccaggctgaggatgaggctgattattactgccagtcctatgacagcagcctgagtgcttatgtcttcggaactgggaccaaggtcaccgtcct

SEQ ID NO: 10397 - DNA, 334 bp, Homo sapiens
cagtctgtgttgacgcagccgccctcagtgtctggggccccagggcagagggtcaccatctcctgcactgggagcagctccaacgtcggggcaggttctgatgtgcactggtaccagcaccttccaggaacaggccccaaactcctcatctccgctataaacaatcggccctcaggggtccctgaccgattctctggctccaagtctggcacctcagcctccctggccatcactgggctccaggctgaggatgaggctgattattactgccagtcctatgacagcagcctgagtggtgtggtattcggcggagggaccaagctgaccgtcctag

SEQ ID NO: 10398 - DNA, 332 bp, Homo sapiens; identical to SEQ ID NO: 10396

SEQ ID NO: 10399 - DNA, 334 bp, Homo sapiens
cagtctgtgttgacgcagccgccctcagtgtctggggccccagggcagagggtcaccatctcctgcactgggagcagctccaacgtcggggcaggttctgatgtacactggtaccagcaccttccaggaacaggccccaaactcctcatctccgctataaacaatcggccctcaggggtccctgaccgattctctggctccaagtctggcacctcagcctccctggccatcactgggctccaggctgaggatgaggctgactattactgccagtcctatgacagcagcctgagtggtgtggtattcggcggagggaccaagctgaccgtcctag

SEQ ID NO: 10400 - DNA, 332 bp, Homo sapiens; identical to SEQ ID NO: 10396

SEQ ID NO: 10401 - DNA, 332 bp, Homo sapiens; identical to SEQ ID NO: 10396

SEQ ID NO: 10402 - DNA, 332 bp, Homo sapiens
cagtctgtgttgacgcagccgccctcagtgtctggggccccagggcagagggtcaccatctcctgcactgggagcagctccaacgtcggggcaggttctgatgtacactggtaccagcaccttccaggaacaggccccaaactcctcatctccgctataaacaatcggccctcaggggtccctgaccgattctctggctccaagtctggcacctcagcctccctggccatcactgggctccaggctgaggatgaggctgactattactgccagtcctatgacagcagcctgagtgcttatgtcttcggaactgggaccaaggtcaccgtcct

SEQ ID NO: 10403 - DNA, 332 bp, Homo sapiens; identical to SEQ ID NO: 10396

SEQ ID NO: 10404 - DNA, 332 bp, Homo sapiens; identical to SEQ ID NO: 10396

SEQ ID NO: 10405 - DNA, 332 bp, Homo sapiens; identical to SEQ ID NO: 10396

SEQ ID NO: 10406 - DNA, 332 bp, Homo sapiens; identical to SEQ ID NO: 10396

SEQ ID NO: 10407 - DNA, 332 bp, Homo sapiens; identical to SEQ ID NO: 10402

SEQ ID NO: 10408 - DNA, 332 bp, Homo sapiens; identical to SEQ ID NO: 10402

SEQ ID NO: 10409 - DNA, 334 bp, Homo sapiens; identical to SEQ ID NO: 10399

SEQ ID NO: 10410 - DNA, 332 bp, Homo sapiens
cagtctgccctgactcagcctccctccgcgtccgggtctcctggacagtcagtcaccatctcctgcactggaaccagcagtgacattggtcgttataactatgtctcctggtaccaacagcacccaggcaaagcccccaaactcatcatttatgacgtcaataagcggccctcaggggtccctgatcgcttctctggctccaagtctggcaacacggcctccctgaccgtctctgggctccaggctgaggatgaggctgattattactgcaactcatatgcaggcagcaacaatttaggggtcttcggaactgggaccaaggtcaccgtcct

SEQ ID NO: 10411 - DNA, 340 bp, Homo sapiens
gacatcgtgatgacccagtctccagactccctggctgtgtctctgggcgagagggccaccatcaactgcaagtccagccagagagttttatacagctccaacaataagaactacttagcttggtaccaacagaaaccaggacagcctcctaagctgctcatttactgggcatctacccgggaatccggggtccctgaccgattcagtggcagcgggtctgggacagatttcactctcaccatcagcagcctgcaggctgaagatgtggcagtttattactgtcagcaatattatactactcctccgacgttcggccaagggaccaaggtggaaatcaaac

SEQ ID NO: 10412 - DNA, 340 bp, Homo sapiens
gacatcgtgatgacccagtctccagactccctggctgtgtctctgggcgagagggccaccatcaactgcaagtccagccagagagttttatacagctccaacaataagaactacttagcttggtaccaacagaaacgaggacagcctcctaagctgctcatttactgggcatctacccgggaatccggggtccctgaccgattcagtggcagcgggtctgggacagatttcactctcaccatcagcagcctgcaggctgaagatgtggcagtttattactgtcagcaatattatactactcctccgacgttcggccaagggaccaaggtggaaatcaaac

SEQ ID NO: 10413 - DNA, 340 bp, Homo sapiens; identical to SEQ ID NO: 10411

SEQ ID NO: 10414 - DNA, 340 bp, Homo sapiens; identical to SEQ ID NO: 10411

SEQ ID NO: 10415 - DNA, 340 bp, Homo sapiens; identical to SEQ ID NO: 10412

SEQ ID NO: 10416 - DNA, 340 bp, Homo sapiens; identical to SEQ ID NO: 10412

SEQ ID NO: 10417 - DNA, 340 bp, Homo sapiens
gacatcgtgatgacccagtctccagactccctggttgtgtctctgggcgagagggccaccatcaactgcaagtccagccagagacttttatacagctccaacaataagaactacttagcttggtaccaacagaaaccaggacagcctcctaagctgctcatttactgggcatctacccgggaatccggggtccctgaccgattcagtggcagcgggtctgggacagatttcactctcaccatcaacatcctgcaagctgaagatgtggcagtttattactgtcagcaatattatactgctcctccgacgttcggccaagggaccaaggtggaaatcaaac

SEQ ID NO: 10418 - DNA, 322 bp, Homo sapiens
gacatccagatgacccagtctccatcctccctgtctgcatctgtaggagacagagtcaccatcacttgccgggcgagtcaggtcattagcaattctttagcctggtatcagcagaaaccagggaaagcccctaagctcctgatctatgctgcatccagtttgcaaagtggggtcccatcaaggttcagtggcagtggatctgggacagatttcactctcaccatcagcagcctgcaggctgaagatgtggcagtttattactgtcagcaatattatactactcctccgacgttcggccaagggaccaaggtggaaatcaaac

SEQ ID NO: 10419 - DNA, 340 bp, Homo sapiens; identical to SEQ ID NO: 10411

SEQ ID NO: 10420 - DNA, 340 bp, Homo sapiens; identical to SEQ ID NO: 10411

SEQ ID NO: 10421 - DNA, 325 bp, Homo sapiens
gaaattgtgttgacgcagtctccaggcaccctgtctttgtctccaggggaaagagccaccctctcctgcagggccagtcagagtcttagcagcagctccttagcctggtaccagcagaaacctggccaggctcccaggctcctcatctatggtgcatccagcagggccactggcgtccgcgacagcttcagtggcagtgggtctgggacagacttcactctcaccatcagcagactggagcctgaagattttgcagtgtattactgtcagcactatggtagctcaccattcactttcggccctgggaccaaagtcgatatcaaac

SEQ ID NO: 10422 - DNA, 322 bp, Homo sapiens
gacatccagatgacccagtctccatcctccctgtctgcatctgtaggagacagagtcaccatcacttgccgggcaagtcagagcattagtagttatttaaattggtatcagcagaaaccagggaaagcccctaagctcctgatctatgctgcatccagtttgcaaagtggggtcccatcaaggttcagtggcagtggatctgggacagatttcactctcaccatcagcagtctgcaacctgaagattttgcaacttactactgtcaacagagttacactaccccgtggacgttcggccaagggaccaaggtggaaatcaaac

SEQ ID NO: 10423 - DNA, 334 bp, Homo sapiens
gatattgtgatgactcagtctccactctccctgcccgtcacccctggagagccggcctccatctcctgcaggtctagtcagagcctcctgcatagtaatggatacaagtatttggattggtacctgcagaagccagggcagtctccacagctcctgatctatttgggttctaatcgggcctccggggtccctgacaggttcagtggcagtggatcaggcacagattttacactgaaaatcagcagagtggaggctgaggatgttggggtttattactgcatgcaagctctacatactcctgttttcggcggagggaccaaggtggagatcaaac

SEQ ID NO: 10424 - DNA, 340 bp, Homo sapiens; identical to SEQ ID NO: 10411

SEQ ID NO: 10425 - DNA, 325 bp, Homo sapiens
gaaattgtgttgacgcagtctccaggcaccctgtctttgtctccaggggaaagagccaccctctcctgcagggccagtcagagtgttagcagcagcttcttagcctggtaccagcagaaacctgaccagactcccaggctcctcatctatggtgcatccagcagggccactggcatcccagacaggttcagtggcagtgggtctgggacagacttcattctcaccatcagcagactggagcctgaagattttgcagtgtattactgtcagcagtatagtagttcacctctgacgttcggccaagggaccagggtggaaagcaaac

SEQ ID NO: 10426 - DNA, 325 bp, Homo sapiens
gaaattgtgttgacgcagtctccaggcaccctgtctttgtctccaggggaaagagccaccctctcctgcagggccagtcagagtgttagcagcagcttcttagcctggtaccagcagaaacctggccaggctcccaggctcctcatctatggtgcatccagcagggccactgccatcccagacaggttcagtggcagtgggtctgggacagacttcattctcaccatcagcagactggagcctgaagattttgcagtgtattactgtcagcagtatagtagttcacctctgacgttcggccaagggaccagggtggaaagcaaac

SEQ ID NO: 10427 - DNA, 325 bp, Homo sapiens; identical to SEQ ID NO: 10425

SEQ ID NO: 10428 - DNA, 325 bp, Homo sapiens; identical to SEQ ID NO: 10425

SEQ ID NO: 10429 - DNA, 325 bp, Homo sapiens
gaaattgtgttgacgcagtctccaggcaccctgtctttgtctccaggggaaagagccaccctctcctgcagggccagtcagagtgttagcagcagcttcttaacctggtaccagcagaaacctggccaggctcccaggctcctcatctatggtgcatccagcagggccactgccatcccagacaggttcagtggcagtgggtctgggacagacttcattctcaccatcagcagactggagcctgaagattttgcagtgtattactgtcagcagtatagtagttcacctctgacgttcggccaagggaccagggtggaaagcaaac

SEQ ID NO: 10430 - DNA, 325 bp, Homo sapiens; identical to SEQ ID NO: 10425

SEQ ID NO: 10431 - DNA, 325 bp, Homo sapiens; identical to SEQ ID NO: 10425

SEQ ID NO: 10432 - DNA, 325 bp, Homo sapiens; identical to SEQ ID NO: 10426

SEQ ID NO: 10433 - DNA, 325 bp, Homo sapiens; identical to SEQ ID NO: 10426

SEQ ID NO: 10434 - DNA, 325 bp, Homo sapiens; identical to SEQ ID NO: 10426

SEQ ID NO: 10435 - DNA, 325 bp, Homo sapiens; identical to SEQ ID NO: 10426

SEQ ID NO: 10436 - DNA, 325 bp, Homo sapiens; identical to SEQ ID NO: 10425

SEQ ID NO: 10437 - DNA, 325 bp, Homo sapiens
gaaattgtgttgacgcagtctccaggcaccctgtctttgtctccaggggaaagagccaccctctcctgcagggccagtcagagtgttagcagcagcttcttagcctggtaccagcagaaacctgaccaggctcccaggctcctcatctatggtgcatccagcagggccactggcatcccagacaggttcagtggcagtgggtctgggacagacttcattctcaccatcagcagactggagcctgaagattttgcagtgtattactgtcagcagtatggtagctcaccgtggacgttcggccaagggaccaaggtggaaatcaaac

SEQ ID NO: 10438 - DNA, 325 bp, Homo sapiens; identical to SEQ ID NO: 10425

SEQ ID NO: 10439 - DNA, 328 bp, Homo sapiens
tcttctgagctgactcaggaccctgctgtgtctgtggccttgggacagacagtcaggatcacatgccaaggagacagcctcagaagctattatgcaagctggtaccagcagaagccaggacaggcccctgtccttgtcatctatggtaaaaacaaccggccctcagggatcccagaccgattctctggctccagctcaggaaacacagcttccttgaccatcactggggctcaggcggaagatgaggctgactattactgtaactcccgggacagcagtggtaaccatccttgggtgttcggcggagggaccaagctgaccgtcctag

SEQ ID NO: 10440 - DNA, 325 bp, Homo sapiens
tcctatgagctgacacagccaccctcggtgtcagtgtccccaggacaaacggccaggatcccctgctctggagatgcattgccaaaaaagtatgcttattggtaccagcagaagtcaggccaggcccctgtgctggtcatctatgaggacaacaaacgaccctccgggatccctgagagattctctggctccagctcagggacaatggccaccttgactatcagtggggcccaggtggaggatgaagctgactactactgttactcaacagacagcactggtaatcatagggtattcggcggagggaccaagctgaccgtcctag

SEQ ID NO: 10441 - DNA, 324 bp, Homo sapiens
gacatccagatgacccagtctccatcctccctgtctgcatctgtaggagacagagtcaccatcacttgccgggcaagtcagagcattatcagctatttaaattggtatcagcagaaaccagggaaagcccctaagctcctgatctatgctgcatccagtttgcaaagtggggtcccatcaaggttcagtggcagtggatctgggacagatttcactctcaccatcagcagtctgcaacctgaagattttgcaacttactactgtcaacagagttacagtacccctccgtggacgttcggccaagggaccaaggtggaaatcaaa

SEQ ID NO: 10442 - DNA, 322 bp, Homo sapiens
gacatccagatgacccagtctccatcctccctgtctgcatctgtaggagacagagtcaccatcacttgccgggcaagtcagggcattagaaatgatttaggctggtatcagcagaaaccagggaaagcccctaagcgcctgatctatgctgcatccagtttgcaaagtggggtcccatcaaggttcagcggcagtggatctgggacagaattcactctcacaatcagcagcctgcagcctgaagatttagcaacttattactgtctacagcataatagttacccgtggacgttcggccaagggaccaaggtggaaatcaaac

SEQ ID NO: 10443 - DNA, 319 bp, Homo sapiens
gacatccagatgacccagtctccatcctccctgtctgcatctgtaggagacagagtcaccatcacttgccgggcgagtcagggcattagcaattatttagcctggtatcagcagaaaccagggaaagttcctaacctcctgatctatgctgcatccactttgcaatcaggggtcccatctcggttcagtggcagtggatctgggccagatttcactctcaccatcagcagcctgcagcctgaagatgttgcaacttattactgtcaaaagtataacagtgtccctttcactttcggccctgggaccaaagtggatatca

SEQ ID NO: 10444 - DNA, 322 bp, Homo sapiens
gacatccagatgacccagtctccatcctccctgtctgcatctgtaggagacagagtcaccatcacttgccaggcgagtcaggacattagcaactatttaaattggtatcagcagaaaccagggaaagcccctaggctcctgatttacgatgcatccaatttggaaacaggggtcccatcaaggttcagtggaagtggatctgggacagattttactttcaccatcagcagcctgcagcctgaagatattgcaacatattactgtcaacagcatgatactcttcctccgctcttcggcggagggaccaaggtggagatcaaac

SEQ ID NO: 10445 - DNA, 331 bp, Homo sapiens
cagtctgccctgactcagcctcgctcagtgtccgagtctcctggacagtcagtcaccatctcctgcactggaaccagcagtgatgttggtggttataactatgtctcctggtaccaacagcacccaggcaaagcccccaaactcatgatttatgatgtcagtaagcggccctcaggggtccctgatcgcttctctggctccaagtctggcaacacggcctccctgaccatctctgggctccaggctgaggatgaggctgattattactgctgctcatatgcaggcagctactcttatgtcttcggaactgggaccaaggtcaccgtcctag

SEQ ID NO: 10446 - DNA, 325 bp, Homo sapiens
gaaatagtgatgacgcagtctccagccaccctgtctgtgtctccaggggaaagagccaccctctcctgcagggccagtcagagtgttagcagcaacttagcctggtaccagcagaaacctggccaggctcccaggctcctcatctatggtgcatccaccagggccactggtatcccagccaggttcagtggcagtgggtctgggacagagttcactctcaccatcagcagcctgcagtctgaagattttgcagtttattactgtcagcagtataataactggcccccattcactttcggccctgggaccaaagtggatatcaaac

SEQ ID NO: 10447 - DNA, 316 bp, Homo sapiens
tcctatgtgctgactcagccaccctcagtgtcagtggccccaggaaagacggccaggattacctgtgggggaaacaacattggaagtaaaaatgtgcactggtaccagcagaagccaggccaggcccctgtgctggtcatctattatgatagcgaccggccctcagggatccctgagcgattctctggctccaactctgggaacacggccaccctgaccatcagcagagtcgaagccggggatgaggccgactattactgtcaggtgtgggatattagtgtggtattcggcggagggaccaagctgaccgtcctag

SEQ ID NO: 10448 - DNA, 332 bp, Homo sapiens; identical to SEQ ID NO: 10396

SEQ ID NO: 10449 - DNA, 323 bp, Homo sapiens
cagtctgccctgactcagcctgcctccgtgtctgggtctcctggacagtcgatcaccatctcctgcactggaaccagcagtgatgttgggagttataaccttgtctcctggtaccaacagcacccaggcaaagcccccaaactcatgatttatgaggtcagtaagcggccctcaggggtttctaatcgcttctctggctccaagtctggcaacacggcctccctgacaatctctgggctccaggctgaggacgaggctgattattactgctgctcatatgcagacttgggtgttcggcggagggaccaagctgaccgtcctag

SEQ ID NO: 10450 - DNA, 322 bp, Homo sapiens
gacatccagatgacccagtctccatcctcactgtctgcatctgtaggagacagagtcaccatcacttgtcgggcgagtcagggcattagcaattatttagcctggtttcagcagaaaccagggaaagcccctaagtccctgatctatgctgcatccagtttgcaaagtggggtcccgtcaaagttcagcggcagtggatctgggacagatttcactctcaccatcagcagcctgcagcctggagattttgcaacttattactgcctacagtataatagttacccgctcactttcggcggagggaccaaggtggagatcaaac

SEQ ID NO: 10451 - DNA, 325 bp, Homo sapiens
gaaattgtgttgacacagtctccagccaccctgtctttgtctccaggggaaagagccaccctctcctgcagggccagtcagagtgttagcagctacttagcctggtaccaacagaaacctggccaggctcccaggctcctcatctatgatgcatccaacagggccactggcatcccagccaggttcagtggcagtgggtctgggacagacttcactctcaccatcagcagcctagagcctgatgattttgcagtttattactgtcagcagcgtagcaactggcctccgctcactttcggcggagggaccaaggtggagatcaaac

SEQ ID NO: 10452 - DNA, 322 bp, Homo sapiens
gacatccagatgacccagtctccatcctccctgtctgcatctgtaggagacagagtcaccatcacttgccgggcaagtcagagcattagcacctatttaaattggtatcagcagaaaccagggaaagcccctaagctcctgatctatgctgcatccagtttgcaaagtggggtcccatcaaggttcagtggcagtggatctgggacagatttcactctcaccatcagcagtctgcaacctgaagattttgcaacttactactgtcaacagagttacagtacccctctcactttcggcggaggggccaaggtggacatcaaac

SEQ ID NO: 10453 - DNA, 322 bp, Homo sapiens
gacatccagatgacccagtctccatcctccctgtttgcatctgtaggagacagagtcaccatcacttgccgggcaagtcagagcattagcagctatttaaattggtatcagcagaaaccagggaaagcccctaaggtcctgatctttgctgcatccagtttgcagagtggcgtcccatcaaggttcagtggcagtggatctgggacagatttcactctcaccatcagcagtctgcaccctgaagattttgcaacttactactgtcaacagagttacagtacccctcctacttttggccaggggaccaacctggagatcaaac

SEQ ID NO: 10454 - DNA, 322 bp, Homo sapiens
gacatccagatgacccagtctccatcctccctgtctgcatctgtaggagacagagtcaccatcacttgccgggcaagtcagagcattagcagctatttaaattggtatcagcagaaaccagggaaagcccctaagctcctgatctatgctgcatccagtttgcaaagtggggtcccatcaaggttcagtggcagtggatctgggacagatttcactctcaccatcagcagtctgcaacctgaagattttgcaacttactactgtcaacagagttacagtacccctcctacttttggccaggggaccaagctggagatcaaac

SEQ ID NO: 10455 - DNA, 321 bp, Homo sapiens
gacatccagatgacccagtctccatcctccctgtctgcatctgtaggagacagagtcaccatcacttgccaggcgagtcaggacattagcaactatttaaattggtatcagcagaaaccagggaaagcccctaagctcctgatctacgatgcatccaatttggaaacaggggtcccatcaaggttcagtggaagtggatctgggacagattttactttcaccatcagcagcctgcagcctgaagatattgcaacatattactgtcaacactatgaaaatctcctgtacacttttggccaggggaccaagctggagatcaaa

SEQ ID NO: 10456 - DNA, 331 bp, Homo sapiens
cagtctgtgttgacgcagccgccctcagtgtctgcggccccaggacagaaggtcaccatctcctgctctggaagcagctccaacattgggaataattatgtatcctggtaccagcagttcccaggaacagcccccaaactcctcatttatgacaatcataagcgaccctcagggattcctgaccgattctctggctccaagtctggcacgtcagccaccctgggcatcaccggactccagactggggacgaggccgattattactgcggaacatgggatagcagcctgagtgctggggtgttcggcggagggaccaagctgaccgtcctag

SEQ ID NO: 10457 - DNA, 331 bp, Homo sapiens
cagtctgtgttgacgcagccgccctcagtgtctgcggccccaggacagaaggtcaccatctcctgctctggaagcagctccaacattgggaataattatgtatcctggtaccagcagctcccaggaacagcccccaaactcctcatctatgaagatagtaagcgaccctcagggattcctgaccgattcgctggctccaagtctggcacgtcagccaccctgggcatcaccggactccagactggggacgaggccgattattactgcggaacatgggatagcagcctgagtgctggggtattcggcggagggaccaagctgaccgtcctag

SEQ ID NO: 10458 - DNA, 337 bp, Homo sapiens
gacatcgtgatgacccagtctccagactccctggctgtgtctctgggcgagagggccaccatcaactgcaagtccagccagagtgttttatacagctccaacaataagaactacttagcttggtaccagcagaaaccaggacagcctcctaagctgctcatttactgggcatctacccgggaatccggggtccctgaccgattcagtggcagcgggtctgggacagatttcactctcaccatcagcagcctgcaggctgaagatgtggcagtttattactgtcagcaatattatagtactcccacttttggccaggggaccaagctggagatcaaac

SEQ ID NO: 10459 - DNA, 325 bp, Homo sapiens
gaaattgtgttgacacagtctccagccaccctgtctttgtctccaggggaaagagccaccctctcctgcagggccagtcagagtgttagcagctacttagcctggtaccaacagaaacctggccaggctcccaggctcctcatctatgatgcattccacagggccactggcatcccagccaggttcagtggcagtgggtctgggacagacttcactctcaccatcagcagcctagagcctgaagattttgcagtttattactgtcagcagcgttacaactggcctccgtacacttttggccaggggaccaagctggagatcaaac

SEQ ID NO: 10460 - DNA, 322 bp, Homo sapiens
gccatccggatgacccagtctccatcctcattctctgcatctacaggagacagagtcaccatcacttgtcgggcgagtcagggtattagcagttatttagcctggtatcagcaaaaaccagggaaagcccctaagctcctgatctatgctgcatccactttgcaaagtggggtcccatcaaggttcagcggcagtggatctgggacagatttcactctcaccatcagcagtctgcaacctgaagattttgcaacttactactgtcaacagagttacactaccccgtggacgttcggccaagggaccaaggtggaaatcaaac

SEQ ID NO: 10461 - DNA, 322 bp, Homo sapiens; identical to SEQ ID NO: 837

SEQ ID NO: 10462 - DNA, 340 bp, Homo sapiens
gacatcgtgatgacccagtctccagactccctggctgtgtctctgggcgagagggccaccatcaactgcaagtccagccagagtgttttttccagctccaacaataggaactacttaacttggtaccagcagaaaccagggcagcctcctaagctgctcatttactgggcatctacccgggaatccggggtccctgaccgattcagtggcagcgggtctgggacagatttcactctcaccatcagcagcctgcaggctgaagatgtggcagtttattactgtcagcaatattatagtactcctcggacgttcggccaagggaccaaggtggaaatcaaac

SEQ ID NO: 10463 - DNA, 340 bp, Homo sapiens
cagtctgccctgactcagcctgcctccgtgtctgggtctcctggacagtcgatcaccatctcctgcactggaaccagcagtgacgttggtggttataactatgtctcctggtaccaacaacacccaggcaaagcccccaaactcatgatttatgatgtcactaatcggccctcaggggtttctaatcgcttctctggctccaagtctggcaacacggcctccctgaccatctctgggctccaggctgaggacgaggctgcttattactgcagctcatatacaaccagcagcactctcgactgggtggtcttcggcggagggaccaagctgaccgtcctag

SEQ ID NO: 10464 - DNA, 334 bp, Homo sapiens
cagtctgtgctgacgcagccgccctcagtgtctggggccccagggcagagggtcaccatctcctgcactgggagcagctccaacatcggggcaggttacgctgtacattggtaccagcagcttccaggaacggcccccaggctcctcatgtatagtaccactagacggacctcgggggtccctggccgattctctggctccgagtctggcacctcagcctccctggccatcactggcctccaggctgaggatgaggctgattattattgccagacctatgacaacagcctgaatggttgggtgttcggcggagggaccaaactgaccgtcctag

SEQ ID NO: 10465 - DNA, 322 bp, Homo sapiens; identical to SEQ ID NO: 1798

SEQ ID NO: 10466 - DNA, 325 bp, Homo sapiens
gacatccagatgacccagtctccatcctccctgtctgcatctgtaggagacagagtcaccatcacttgccgggcgagtcagggcattagcaattatttagcctggtatcagcagaaaccagggaaagttcctaagctcctgatctatgctgcatccactttgcaatcaggggtcccatctcggttcagtggcagtggatctgggacagatttcactctcaccatcagcagcctgcagcctgaagatgttgcaacttattactgtcaaaagtataacagtgcccctatgtacacttttggccaggggaccaagctggagatcaaac

SEQ ID NO: 10467 - DNA, 322 bp, Homo sapiens
tcctatgagctgactcagccaccctcagtgtccgtgtccccaggacagacagccagcatcacctgctctggagataaattggggaataaatatgcttgctggtatcagcagaagccaggccagtcccctgtgttggtcatctatcaagataacaagcggccctcagggatccctgagcgattctctggctccaactctgggaacacagccactctgaccatcagcgggacccaggctatggatgaggctgactattactgtcaggcgtgggacagcagcactttttatgtcttcggaactgggaccaaggtcaccgtcctag

SEQ ID NO: 10468 - DNA, 325 bp, Homo sapiens; identical to SEQ ID NO: 888

SEQ ID NO: 10469 - DNA, 322 bp, Homo sapiens
gccatccggatgacccagtctccatcctcattctctgcatctacaggagacagagtcaccatcacttgtcgggcgagtcagggtattagcagttatttagcctggtatcagcaaaaaccagggaaagcccctaagctcctgatctatgctgcatccactttgcaaagtggggtcccatcaaggttcagcggcagtggatctgggacagatttcactctcaccatcagctgcctgcagtctgaagattttgcaacttattactgtcaacagtattatagttacttcctcactttcggcggagggaccaaggtggagatcaaac

SEQ ID NO: 10470 - DNA, 322 bp, Homo sapiens
gacatccagatgacccagtctccatcctccctgtctgcatctgtaggagacagagtcaccatcacttgccgggcgagtcagggcattagcaattatttagcctggtatcagcagaaaccagggaaagttcctaagctcctgatctatgctgcatccactttgcaatcaggggtcccatctcggttcagtggcagtggatctgggacagatttcactctcaccatcagcagcctgcagcctgaagatgttgcaacttattactgtcaaaagtataacagtgccccattcactttcggccctgggaccaaagtggatatcaaac

SEQ ID NO: 10471 - DNA, 322 bp, Homo sapiens
gacatccagatgacccagtctccatcctccctgtctgcatctgtaggagacagagtcaccatcacttgccgggcgagtcagggcattagcaattacttagcctggtatcagcagaaaccagggaaagttcctaagctcctgatctatgctgcatccaccttgcaatcaggggtcccatctcggttcagtggcagtggatctgggacagatttcactctcaccatcagcagcctgcagcctgaagatgttgcaacttattactgtcaaaagtataacagtgccccattcactttcggccctgggaccaaagtggatatcaaac

SEQ ID NO: 10472 - DNA, 337 bp, Homo sapiens
gatgttgtgatgactcagtctccactctccctgcccgtcacccttggacagccggcctccatctcctgcaggtctagtcaaagcctcgtatacagtgatggaaacacctacttgaattggtttcagcagaggccaggccaatctccaaggcgcctaatttataaggtttctaaccgggactctggggtcccagacagattcagcggcagtgggtcaggcactgatttcacactgaaaatcagcagggtggaggctgaggatgttggggtttattactgcatgcaaggtacacactggcccgtggagttcggccaagggaccaaggtggaaatcaaac

SEQ ID NO: 10473 - DNA, 325 bp, Homo sapiens
gaaatagtgatgacgcagtctccagccaccctgtctgtgtctccaggggaaagagccaccctctcctgcagggccagtcagagtgttagcagcaacttaggctggtaccagcagaaacctggccaggctcccaggctcctcatctatggtgcatccaccagggccactggtatcccagccaggttcagtggcagtgggtctgggacagacttcactctcaccatcagcagcctgcagtctgaagattttgcagtttattactgtcagcagtataataactggcctcggaacacttttggccaggggaccaagctggagatcaaac

SEQ ID NO: 10474 - DNA, 325 bp, Homo sapiens
gaaattgtgttgacacagtctccagccaccctgtctttgtctccaggggaaagagccaccctctcctgcagggccagtcagagtgttagcagcttcttagcctggtaccaacagaaacctggccaggctcccaggctcctcatctatgatgcatccaacagggccactggcatcccagccaggttcagtggcagtgggtctgggacagacttcactctcaccatcagcagcctagagcctgaagattttgcagtttattactgtcagcagcgtagcaactggcctccgctcactttcggcggagggaccaaggtggagatcaaac

SEQ ID NO: 10475 - DNA, 328 bp, Homo sapiens
caggctgtggtgactcaggagccctcactgactgtgtccccaggagggacagtcactctcacctgtggctccagcactggagctgtcaccagtggtcattatccctactggttccagcagaagcctggccaagcccccaggacactgatttatgatacaagcaacaaacactcctggacccctgcccggttctcaggctccctccttgggggcaaagctgccctgaccctttcgggtgcgcagcctgaggatgaggctgagtattactgcttgctctcctatagtggtgctgtggtattcggcggagggaccaagctgaccgtcctag

SEQ ID NO: 10476 - DNA, 322 bp, Homo sapiens
gacatccagatgacccagtctccatcctccctgcctgcatctgtaggagacagagtcaccatcacttgccaggcgagtcaggacattaacaagtatttaaattggtatcagcagaaaccagggaaagcccctaagctcctgatctacgatgcatccaatttggaaacaggggtcccatcaaggttcagaggaagtggatctgggacagattttactttcaccatcagcagcctgcagcctgaagatattggaacatattactgtcaacaatatgataattttcctccgactttcggccctgggaccaaagtggatatcaaac

SEQ ID NO: 10477 - DNA, 334 bp, Homo sapiens
cagtctgtgctgacgcagccgccctcagtgtctggggccccagggcagagggtcaccatctcctgcactgggagcagctccaacatcggggcaggttatgatgtacactggtaccagcagcttccaggaacagcccccaaactcctcatctatggtaacagcaatcggccctcaggggtccctgaccgattctctggctccaagtctggcacctcagcctccctggccatcactgggctccaggctgaggatgaggctgattattactgccaatcctatgacagcagcctgagtggttcggtgttcggcggagggaccaagctgaccgtcctag

SEQ ID NO: 10478 - DNA, 334 bp, Homo sapiens
cagtctgtgctgacgcagccgccctcagtgtctggggccccagggcagagggtcaccatctcctgcactgggagcagctccaacatcggggcaggttatgatgtacactggtaccagcagcttccaggaacaacccccaaactcctcatctatggtaacaccaatcggccctcaggggtccctgaccgattctctggctccaagtctggcacctcagcctccctggccatcactgggctccaggctgaggatgaggctgattattactgccagtcctttgacaaccgcctgggtgcttatgtcttcggaactgagaccaaggtcaccgtcctag

SEQ ID NO: 10479 - DNA, 337 bp, Homo sapiens
cagtctgtgctgactcagccaccctcagcgtctgggacccccgggcagagggtcaccatctcttgttctggaagcagctccaacatcggaagtaattatgtatactggtaccagcagctcccaggaacggcccccaaactcctcatctataggaataatcagcggccctcaggggtccctgaccgattctctggctccaagtctggcacctcagcctccctggccatcagtgggctccggtccgaggatgaggctgattattactgtgcagcatgggatgacagcctgagtggccgttattgggtgttcggcggagggaccaagctgaccgtcctag

SEQ ID NO: 10480 - DNA, 325 bp, Homo sapiens; identical to SEQ ID NO: 903

SEQ ID NO: 10481 - DNA, 322 bp, Homo sapiens
gacatccagatgacccagtctccttccaccctgtctgcatctgtaggagacagagtcaccatcacttgccgggccagtcagagtgttagtagctggttggcctggtatcagcagaaaccagggaaagcccctaaactcctgatctataaggcgtctagtttagaaagtggggtcccatcaaggttcagcggcagtggatctgggacagaattcactctcaccatcagcagcctgcagcctgatgattttgcaacttattactgccaacagtataatagttacccgtggacgttcggccaagggaccaaggtggaaatcaaac

SEQ ID NO: 10482 - DNA, 322 bp, Homo sapiens; identical to SEQ ID NO: 3452

SEQ ID NO: 10483 - DNA, 322 bp, Homo sapiens
gccatccggataacccagtctccatcctcactctctgcatctacaggagacagagtcaccatcacttgtcgggcgagtcagggtattagcagttatttagcctggtatcagcaaaaaccagggaaagcccctaagctcctgatctatgctgcatccactttgcaaagtggggtcccatcaaggttcagcggcagtggatctgggacagatttcactctcaccatcagctgcctgcagtctgaagattttgcaacttattactgtcaacagtattatagttaccccctcactttcggcggagggaccaaggtggagatcaaac

SEQ ID NO: 10484 - DNA, 325 bp, Homo sapiens
gaaatagtgatgacgcagtctccagccaccctgtctgtgtctccaggggaaagagccaccctctcctgcagggccagtcagagtgttagcaacaacttagcctggtaccagcagaaacctggccaggctcccaggctcctcatctatggtgcatccaccagggccactggtatcccagccaggttcagtggcagtgggtctgggacagagttcactctcaccatcagcagcctgcagtctgaagattttgcagtttattactgtcagcagtataataactggcctccgctcactttcggcggagggaccaaggtggagatcaaac

SEQ ID NO: 10485 - DNA, 320 bp, Homo sapiens
gacatccagttgacccagtctccatccttcctgtctgcatctataggtgacagagtcaccgtcacttgccgggccagtcagggcattagtagttatttagcctggtatcagcaaaaaccagggaacgcccctaggctcctgatctatgctgcatccactttgcaaagtggggtcccatcaaggttcagcggcagtggatctgggacagaattcactctcacaatcagcagcctgcagcctgaagattttgcaacttatttctgtcaacagcttcatagttacccgctcactttcggcggagggaccaaggtggagatcaa

SEQ ID NO: 10486 - DNA, 328 bp, Homo sapiens
tcctatgtgctgactcagccacccccggtgtcagtggccccaggaaagacggccaggattacctgtgggggagacaacattggaagtaaaaatgtgcactggtaccagcagaagccaggccaggcccctgtgctggtcgtctatgatgatagcgaccggccctcagggatccctgagcgattctctggctccaactctggaaacacggccaccctgaccatcagcagggtcgaagccggggatgaggccgactattactgtcaggtgtgggatagtagtagtgatcaccattgggtgttcggcggagggaccaagctgaccgtcctag

SEQ ID NO: 10487 - DNA, 319 bp, Homo sapiens
gacatccagatgacccagtctccatcctccctgtctgcatctgtaggagacagagtcaccatcacttgccgggcgagtcagggcattagcaattatttagcctggtatcagcagaaaccagggaaagttcctaagctcctgatctatgctgcatccactttgcaatcaggggtcccatctcggttcagtggcagtggatctgggacagatttcactctcaccatcagcagcctgcagcctgaagatgttgcaacttattactgtcaaaagtataacagtgcctccattttcggcggagggaccaaggtggagatcaaac

SEQ ID NO: 10488 - DNA, 322 bp, Homo sapiens
gccatccggataacccagtctccatcctcactctctgcatctacaggagacagagtcaccatcacttgtcgggcgagtcagggtattagcagttatttagcctggtatcagcaaaaaccagggaaagcccctaagctcctgatctatgctgcatccactttgcaaagtggggtcccatcaaggttcagcggcagtggatctgggacagatttcactctcaccatcagctgcctgcagtctgaagattttgcaacttattactgtcaacagtattatagttacccccggacgttcggccaagggaccaaggtggaaatcaaac

SEQ ID NO: 10489 - DNA, 325 bp, Homo sapiens
gacatccagatgacccagtctccatcttctgtgtctgcatctgtaggagacagagtcaccatcacttgtcgggcgagtcagggtattagcagctggttagcctggtatcagcagaaaccagggaaagcccctaagctcctgatctatgctgcatccagtttgcaaagtggggtcccatcaaggttcagcggcagtggatctgggacagatttcactctcactatcagcagcctgcagcctgaagattttgcaacttactattgtcaacaggctaacagtttcctcccgatcaccttcggccaagggacacgactggagattaaac

SEQ ID NO: 10490 - DNA, 322 bp, Homo sapiens
gacatccagttgacccagtctccatccttcctgtctgcatctgtaggagacagagtcaccatcacttgccgggccagtcagggcattagtagttatttagcctggtatcagcaaaaacccgggaaagcccctaagctcctgatctatgctgcatccactttgcaaagtggggtcccatcaaggttcagcggcagtggatctgggacagaattcactctcacaatcagcagcctgcagcctgaagattttgcaacttattactgtcaacagcttaatagttacctcttcactttcggccctgggaccaaagtggatatcaaac

SEQ ID NO: 10491 - DNA, 325 bp, Homo sapiens
gacatccagatgacccagtctccatcctccctgtctgcatctgtaggagacagagtcaccatcacttgccaggcgagtcaggacattagcaactctttaaattggtatcagcagaaaccagggaaagcccctaacctcctggtctacgatgcgtccaatttggaaacaggggtcccatcaaggttcagtggaagtggatctgggacagattttactttcaccatcaacagcctgcagcctgaagatattgcaacatattactgtcaacagtttgataatctccctcggtacacttttggccaggggaccaagctggagatcaaac

SEQ ID NO: 10492 - DNA, 322 bp, Homo sapiens
gacatccagatgacccagtctccatcctccctgtctgcatctgtaggagacagagtcaccatcacttgccaggcgagtcaggacattagcaactatttaaattggtatcagcagaaaccagggaaagcccctaagctcctgatctacgatgcatccaatttggaaacaggggtcccatcaaggttcagtggaagtggatctgggacagattttactttcaccatcagcagcctgcagcctgaagatattgcaacatattactgtcaacagtatgataatctccctatcaccttcggccaagggacacgactggagattaaac

SEQ ID NO: 10493 - DNA, 322 bp, Homo sapiens
gccatccggatgacccagtctccatcctcattctctgcatctacaggagacagagtcaccatcacttgtcgggcgagtcagggtattagcagttctttagcctggtatcagcagaaaccagggaaagcccctaagctcctgatctatgctgcatccactttgcaaagtggggtcccatcaaggttcagcggcggtggatctgggacagatttcactctcaccatcggcggcctgcagtctgaagattatgcaacttattactgtcaacagtattatgattaccctcggacgttcggccaagggaccaagttggaaatcaaac

SEQ ID NO: 10494 - DNA, 331 bp, Homo sapiens
cagtctgtgctgactcagccaccctcggtgtctgaagcccccaggcagagggtcaccatctcctgttctggaagcagctccaacatcggacataatgctgtaaactggtaccagcagctcccaggaaaggctcccaaactcctcatctattatgatgatctgctgccctcaggggtctctgaccgattctctggctccaagtctggcacctcagcctccctggccatcagtgggctccagtctgaggatgaggctgattattactgtgcatcatgggatgacaggctgaatggtcccgtgttcggcggagggaccaagctgaccgtcctag

SEQ ID NO: 10495 - DNA, 325 bp, Homo sapiens
tcctatgagctgacacagccaccctcggtgtcagtgtccccaggacaaacggccaggatcacctgctctggagatgcattgccaaaaaaatatgcttattggtaccagcagaagtcaggccaggcccctgtgctggtcatctatgaggacagcaaacgaccctccgggatccctgagagattctctggctccagctcagggacaatggccaccttgattatcagtggggcccaggtggaggatgaagctgactactactgttactcaacagacagcagtggtaatcattgggtgttcggcggagggaccaagctgaccgtcctag

SEQ ID NO: 10496 - DNA, 322 bp, Homo sapiens
gacatccagatgacccagtctccatcctccctgtctgcatccgtaggagacagagtcaccatcacttgccaggcgagtcaggacattaacaactatttaaattggtatcagcagaaaccagggaaagcccctaggctcctgatctacgatgcatccaatttggaaacaggggtcccatcaaggttcagtggaagtggatctgggacagattttactttcaccatcagcagcctgcagcctgaagatattgcaacatattactgtcaacagtatgataatctccctctcactttcggcggagggaccaaggtggagatcaaac

SEQ ID NO: 10497 - DNA, 325 bp, Homo sapiens
gaaattgtgttgacgcagtctccaggcaccctgtctttgtctccaggggaaagagccaccctctcctgcagggccagtcagagtgttaccagcagctacttagcctggtaccagcagaaacctggccaggctcccaggctcctcatctatggtgcatccagcagggccactggcatcccagacaggttcagtggcagtgggtctgggacagacttcactctcaccatcagcagactggagcctgaagattttgcagtgtattactgtcagcagtatggtagctcaccgctcactttcggcggagggaccaaggtggagatcaaac

SEQ ID NO: 10498 - DNA, 325 bp, Homo sapiens
gacatccagatgacccagtctccatcctccctgtctgcatctgtaggagacagagtcaccatcacttgccgggcaagtcagagcattagcaactatttaaattggtatcagcagaaaccagggaaagcccctaagctcctgatctatgctgcatccagtttgcaaagtggggtcccatcaagattcagtggcagtggatctgggacagatttcactctcaccatcagcagtctgcaacctgaagattttgcaacttactactgtcaacagagttacagtacccctccgtacacttttggccaggggaccaagctggagatcaaac

SEQ ID NO: 10499 - DNA, 322 bp, Homo sapiens
gacatccagatgacccagtctccatcctccctgtctgcatctgtaggagacagagtcaccatcacttgccgggcaagtcagagcattagcagctatttaaattggtatcagcagaaaccagggaaagcccctaagctcctgatctatgctgcatccagtttgcaaagtggggtcccatcaaggttcagtggcagtggatctgggacagatttcactctcaccatcagcagtctgcaacctgaagattttgcaacttactactgtcaacagagttacagtacccctcagacgttcggccaagggaccaaggtggaaatcaaac

SEQ ID NO: 10500 - DNA, 324 bp, Homo sapiens
gacatccagatgacccagtctccatcctccctgtctgcttctgtaggagacagagtcaccatcacttgccgggcaagtcagagcattagcacctatttaaattggtatcagcagaaaccagggaaagcccctaagctcctgatctatgctgcatccaatttgcaaactggggtcccctcaaggttcagtggcagtggatctgggacagatttcactctcaccatcagcagtctgcaacctgaagattttgcaacttactactgtcaacagagttacagtacccctccgtacacttttggccaggggaccaagctggagatcaaa

SEQ ID NO: 10501 - DNA, 322 bp, Homo sapiens
gacatccagatgacccagtctccttccaccctgtctgcctctgtaggagacagagtcaccatcacttgccgggccagtcagagtattagtagctggttggcctggtatcagcagaaaccagggaaagcccctaacctcctgatctttaaggcatctactttagaaactggggtcccatcaagcttcagcggcagtggatctgggacagaattcactctcaccatcagcagcctgcagcctgatgattttgcaacttattactgccaacaatataatagttatccgtggacgttcggccaagggaccaaggtggaaatcaaac

SEQ ID NO: 10502 - DNA, 328 bp, Homo sapiens
gaaattgtgttgacacagtctccagccaccctgtctttgtctccaggggaaagagccaccctctcctgcagggccagtcagagtgttagcagctacttagcctggtaccaacagaaacctggccaggctcccaggctcctcatctatgatgcatccaacagggccactggcatcccagccaggttcagtggcagtgggtctgggacagacttcactctcaccatcagcagcctagagcctgaagattttgcagtttattactgtcagcagcgtagcaactggcctccttcgtacacttttggccaggggaccaagctggagatcaaac

SEQ ID NO: 10503 - DNA, 328 bp, Homo sapiens
gaaattgtgttgacgcagtctccaggcaccctgtctttgtctccaggggaaagagccaccctctcctgcagggccagtgagagtgttagcagcagcttcttaggctggtaccagcagaaacctggccaggctcccaggctcctcatctatggtgcttccagcagggccactggcatcccagacaggttcagtggcggtgggtctgggatagacttcactctcaccatcagcagactggagcctgaagattttgcagtgtattactgtcaccagtatggtagctcacccccgtggacgttcggccaagggaccaaggtggaaatcaaac

SEQ ID NO: 10504 - DNA, 331 bp, Homo sapiens
gaaattgtgttgacgcagtctccaggcaccctgtctttgtctccaggggaaagagccaccctctcctgcagggccagtcagagtgttaggagcacctacttagcctggtaccagcagaaacctggccaggctcccaggctcctcatctatggtgcatccagcagggccactggcatcccagacaggttcagtggcagtgggtctgggacagacttcactctcaccatcagcagactggagcctgaagattttgcagtgtattactgtcagcagtatgatagctcacctccgaaactcactttcggcggagggaccaaggtggagatcaaac

SEQ ID NO: 10505 - DNA, 334 bp, Homo sapiens
cagtctgccctgactcagcctgcctccgtgtctgggtctcctggacagtcgatcaccatctcctgcactggaaccagcagtgacgtgggtggttataactatgtctcctggtaccaacagcacccaggcaaagcccccaaactcatgatttatgatgtcagtaatcggccctcaggggtttctaatcgcttctctggctccaagtctggcaacacggcctccctgaccatctctgggctccaggctgaggacgaggctgattattactgcagctcatatagaggcagcagcactctcgatgtcttcggaactgggaccaaggtcaccgtcttag

SEQ ID NO: 10506 - DNA, 322 bp, Homo sapiens; identical to SEQ ID NO: 10488

SEQ ID NO: 10507 - DNA, 328 bp, Homo sapiens
gacatccagatgacccagtctccatcctccctgtctgcatctgtaggagacagagtcaccatcacttgccaggcgagtcaggacataagttactatttaaattggtatcagcagaaacccgggacagcccctaagctcctgatctacgatgcatccagtttggaaacaggggtcccatcaaggttcagtggaactggatctggcacagattttactttcaccatcagcagcctgcagcctgaagatattgcaacatattactgtcaacagtatgataatctccctccttcgatcaccttcggccaagggacacgactggagattaaac

SEQ ID NO: 10508 - DNA, 331 bp, Homo sapiens
cagtctgtgttgactcagccaccctcggtatctgaagcccccaggcagagggtcaccatctcctgttctggaagcagcaccaacgtcggaaataatcctgtaaattggtaccagcagctcccaggaaaggctcccaaactcctcatctattatgatgatctgttgccctcaggggtctctgaccgattctctggctccaagtctggcacctcagcctccctggccatcagtgggctccagtctgaggatgaggctgattattactgtgcagcatgggatgccaggctgaatggttgggtgttcggcggagggaccaagctgaccgtcctag

SEQ ID NO: 10509 - DNA, 340 bp, Homo sapiens
gacatcgtgatgacccagtctccagactccctggctgtgtctctgggcgagagggccaccatcaactgcaagtccagccagagtgttttatacagctccaacaatcagaactacttagcttggtaccagcagaagccaggacagcctcctaagctgctcatttactgggcatctacccgggaatccggggtccctgaccgattcagtggcagcgggtctgggacagatttcgctctcaccatcagcagcctgcaggctgaagatgtggcagtttattactgtcagcaatattatagtactccgtacacttttggccaggggaccaagctggagatcaaac

SEQ ID NO: 10510 - DNA, 337 bp, Homo sapiens
gatattgtgatgactcagtctccactctccctgcccgtcacccctggagagccggcctccatctcctgcaggtctagtcagagcctcctgcatagtaatagatacaactatttggattggtacctgcagaagccagggcagtctccacagctcctgatctatttgggttctaatcgggcctccggggtccctgacagattcagtggcagtggatcaggcacagattttacactgaaaatcagcagagtggaggctgaggatgttggggtttattactgcatgcaagctctacaaactcttcggacgttcggccaagggaccaaggtggaaatcaaac

SEQ ID NO: 10511 - DNA, 328 bp, Homo sapiens
tcctatgagctgacacagccaccctcggtgtcagtgtccccaggacaaacggccaggatcacctgctctggagatgcattgccaaaaaaatatgcttattggtaccagcagaggtcaggccaggcccccgtcctggtcatctatgaggacagcaaacgaccctccgggatccctgagagattctctggctccagctcagggacaatggccaccctgactatcactggggcccaggtggcggatgaagctgactactactgttactcaacagacagcagtgataatcataggagggtcttcggaactgggaccaaggtcatcgtcctag

SEQ ID NO: 10512 - DNA, 331 bp, Homo sapiens
cagtctgtgctgactcagccaccctcagcgtctgggacccccgggcagagggtcaccatctcttgttctggaagcagctccaacatcggaagtaattatgtatactggtaccagcagctcccaggaacggcccccaaactcctcatctataggaataatcagcggccctcaggggtccctgaccgattctctggctccaagtctggcacctcagcctccctggccatcagtgggctccggtccgaggatgaggctgattattactgtgcagcatgggatgacagcctgagtggctgggtgttcggcggagggaccaagctgaccgtcctag

SEQ ID NO: 10513 - DNA, 322 bp, Homo sapiens
gacatccagatgacccagtctccttccaccctgtctgcatctgtaggagacagagtcaccatcacttgccgggccagtcagagtatgagtagctggttggcctggtatcagcagaaaccagggaaagcccctaaactcctgatctataaggcgtctggattagaaagtggggtcccatcaaggttcagcggcagtggatctgggacagaattcactctcaccatcagcagcctgcagcctgatgattttgcaacttattactgccaacagtataatacttatccctggacgttcggccaagggaccaaggtggaaatcaaac

SEQ ID NO: 10514 - DNA, 319 bp, Homo sapiens
tcctatgagctgactcagccaccctcagtgtccgtgtccccaggacagacagccagcatcacctgctctggagataaattgggggataaatatgcttgctggtttcaacagaagccaggccagtcccctgtgttgctcatctatcaagataccaagcggccctcagggatccctgagcgattctctggctccaactctgggaacacagccacgctgaccatcagcgggacccaggctatggatgaggctgactattactgtcaggcgtgggacagcaccactggggtcttcggaactgggaccaaggtcaccgtcctag

SEQ ID NO: 10515 - DNA, 328 bp, Homo sapiens
tcctatgtgctgactcagccaccctcggtgtcagtggccccaggaaagacggccaggattacctgtgggggaaacaacattggaagtaaaagtgtgcactggtaccagcagaagccaggccaggcccctgtgctggtcgtctatgatgatagcgaccggccctcagggatccctgaccgattctctggctccaactctgggaacacggccaccctgaccatcagcagggtcgaagccggggatgaggccgactattactgtcaggtgtggcatagtagtactgatcatcatgtggtattcggcggagggaccaagctgaccgtcctag

SEQ ID NO: 10516 - DNA, 322 bp, Homo sapiens
gaaattgtgttgactcagtctccagccaccctgtctttgtctccaggggaaagagccaccctctcctgcagggccagtcagagtgttagcagctacttagcctggtaccaacagagtcctggccaggctcccaggctcctcatctatgatgcatccaacagggccactggcatcccagccaggttcagtggcagtgggtctgggacagacttcactctcaccatcagcagcctagagcctgaagattttgcagtttattactgtcagcagcgtagcaactggcctctcactttcggcggagggaccaaggtggagatcaaac

SEQ ID NO: 10517 - DNA, 328 bp, Homo sapiens
gacatccagatgacccagtctccatcctccctgtctgcatctgtaggagacagagtcaccatcacttgccaggcgagtcaggacattagcaactatttaaattggtatcagcagaaaccagggaaagcccctaagctcctgatctacgatgcatccaatttggaaacaggggtcccatcaaggttcagtggaagtggatctgggacagattttactttcaccatcagcagcctgcagcctgaagatattgcaacatattactgtcaacagtatgataatctccctccggagtacacttttggccaggggaccaagctggagatcaaac

SEQ ID NO: 10518 - DNA, 322 bp, Homo sapiens
gacatccagatgacccagtctccatcttccgtgtctgcctctgtaggagacagagtcaccatcacttgtcgggcgagtcagggtattaacagctggttagcctggtatcagcagaaaccagggaaagcccctaacctcctgatctatgctgcatccagtttgcaaagtggggtcccatcaaggttcagcggcagtggatctgggacagatttcactctcaccatcaccagcctgcagcctgaagattttgcaacttactattgtcaacaggccaccagtttccctctcactttcggcggagggaccaaggtggagatcaaac

SEQ ID NO: 10519 - DNA, 328 bp, Homo sapiens
tcctatgagctgacacagccaccctcggtgtcagtgtacccaggacagacggccaggatcacctgctctggagatgcattgccaaagcaatatgcttattggtaccagcagaagccaggccaggcccctgtgttggtgatatataaagacagtgagaggccctcagggatccctgagcgattctctggctccacctcagggacaacagtcacgttgaccatcagtggagtccaggcagaagacgaggctgactattactgtcaatcagcagacagcagtggtatttatctttgggtgttcggcggagggaccaagctgaccgtcctag

SEQ ID NO: 10520 - DNA, 340 bp, Homo sapiens
gacatcgtgatgacccagtctccagactccctggctgtgtctctgggcgagagggccaccatcaactgcaagtccagccagagtgttttatacagctccaacaagaagaactacttagcttggtaccagcagaaaccaggacagcctcctaagctgctcatctactgggcatctacccgggaatccggggtccctgaccgattcagtggcagcgggtctgggacagatttcactctcaccatcagcagcctgcaggctgaagatgtggcagtttattactgtcagcaatattatagtactccgtggacgttcggccaagggaccaaggtggaaatcaaac

SEQ ID NO: 10521 - DNA, 322 bp, Homo sapiens; identical to SEQ ID NO: 955

SEQ ID NO: 10522 - DNA, 334 bp, Homo sapiens
cagtctgtgctgacgcagccgccctcagtgtctggggccccagggcagagtatcaccatctcctgcactgggagcagctccaacatcggggcaggttatgatgtacactggtaccagcaacttccaggaacagctcccaaactcctcatctatggtaacagcaatcggccctcaggggtccctgaccgattctctggctccaagtctggcacctcagcttccctggccatcactgggctccaggctgaggatgaggctgattattactgccagtcctatgacagcagcctgagtggttgggtgttcggcggagggaccaagctgaccgtcctag

SEQ ID NO: 10523 - DNA, 322 bp, Homo sapiens
gacatccagatgacccagtctccatcctccctgtctgcatctgtaggagacagagtcaccatcacttgccgggcaagtcagagcattagcagctatttaaattggtatcagcagaaaccagggaaagcccctaagctcctgatctatgctgcatccagtttgcaaagtggggtcccatcaaggttcagtggcagtggatctgggacagatttcactctcaccatcagcagtctgcaacctgaagattttgcaacttactactgtcaacagagttacagtaccacttggacgttcggccaagggaccaaggtggaaatcaaac

SEQ ID NO: 10524 - DNA, 322 bp, Homo sapiens
gacatccagatgacccagtctccatcctccctgtctgcatctgtaggagacagagtcaccatcacttgccgggcaagtcagagcattagcaactctttaaattggtatcagcagaaaccagggaaagcccctaaactcctgatctatgctgcatccagtttgcaaagtggggtcccatcaaggttcagtggcagtggatctgggacagatttcactctcaccatcagcagtctgcaacctgaagattttgcaaattactactgtcaacagagttacaataccctttggacgttcggccaagggaccaaggtggaaatcaaac

SEQ ID NO: 10525 - DNA, 328 bp, Homo sapiens
gaaattgtgttgacacagtctccagccaccctgtctttgtctccaggggaaagagccaccctctcctgcagggccagtcagagtgttagcagctacttagcctggtaccaacagaaacctggccaggctcccaggctcctcatctatgatgcatccaacagggccactggcatcccagccaggttcagtggcagtgggtctgggacagacttcactctcaccatcagcagcctagagcctgaagattttgcagtttattactgtcagcagcgtagcaactggcctccgggatccactttcggccctgggaccaaagtggatatcaaac

SEQ ID NO: 10526 - DNA, 325 bp, Homo sapiens
tcctatgtgctgactcagccaccctcagtgtcagtggccccaggaaagacggccaggattacctgtgggggaaacaacattggaagtaaaagtgtgcactggtaccagcagaagccaggccaggcccctgtgctggtcatctattatgatggcgaccggccctcagggatccctgagcgattctctggctccaactctgggaacacggccaccctgaccatcagcagggtcgaagccggggatgaggccgactattactgtcaggtgtgggatagtagtagtgatcatgtggtattcggcggagggaccaagctgaccgtcctag

SEQ ID NO: 10527 - DNA, 331 bp, Homo sapiens
cagtctgtgttgacgcagccgccctcagtgtctgcggccccaggacagaaggtcaccatctcctgctctggaagcagctccaacattgggaataattatgtttcctggtaccagcagctcccaggaacagcccccaaactcctcatttctgacactaataagcgaccctcagggattcctgaccgattctctggctccaagtctggcacgtcagccaccctgggcatcaccggactccagactggggacgaggccgattattactgcggaacatgggatagcagcctgagtgctgtggtattcggcggagggaccaagctgaccgtcctag

SEQ ID NO: 10528 - DNA, 340 bp, Homo sapiens
cagtctgtgctgacgcagccgccctcagtgtctggggccccagggcagagggtcaccatctcctgcactgggagcgtctccaacatcggggcaggttatgatgtacactggtaccagcagcttccaggaacagcccccaaactcctcatctatggtaacagcaatcggccctcaggggtccctgaccgattctctggttccaagtctggcacctcagcctccctggccatcactgggctccaggctgaggatgaggctgattattactgccagtcctatgacagcagcctgagtggttcgaggggggtgttcggcggagggaccaagctgaccgtcctag

SEQ ID NO: 10529 - DNA, 328 bp, Homo sapiens
tcttctgagctgactcaggaccctgctgtgtctgtggccttgggacagacagtcaggatcacatgccaaggagacagcctcagaagctattatgcaagctggtaccagcagaagccaggacaggcccctgtacttgtcatctatggtaaaaacaaccggccctcagggatcccagaccgattctctggctccagctcaggaaacacagcttccttgaccatcactggggctcaggcggaagatgaggctgactattactgtaactcccgggacagcagtggtaaccatcttggagtattcggcggagggaccaagctgaccgtcctag

SEQ ID NO: 10530 - DNA, 319 bp, Homo sapiens
tcctatgagctgacacagccatcctcagtgtcagtgtctccgggacagacagccaggatcacctgctcaggagatgtactggcaaaaaaatatgctcggtggttccagcagaagccaggccaggcccctgtgttggtgatttataaagacagtgagcggccctcagggatccctgagcgattctccggctccagctcagggaccacagtcaccttgaccatcagcggggcccaggttgaggatgaggctgactattactgttattctgcgtctgacaacaatggggtgttcggcggagggaccaagttgaccgtcctag

SEQ ID NO: 10531 - DNA, 331 bp, Homo sapiens
cagtctgtgttgacgcagccgccctcagtgtctgcggccccaggacagaaggtcaccatctcctgctctggaagcagctccaacattgggaataattatgtatcctggtaccagcagctcccaggaacagcccccaaactcctcatttatgacaataataagcgaccctcagggattcctgaccgattctctggctccaagtctggcacgtcagccaccctgggcatcaccggactccagactggggacgaggccgattattactgcggaacatgggatagcagcctgagtgcgggggtgttcggcggagggaccaagctgaccgtcctag

SEQ ID NO: 10532 - DNA, 334 bp, Homo sapiens
cagtctgccctgactcagcctgcctccgtgtctgggtctcctggacagtcgatcaccatctcctgcactggaaccagcagtgacgttggtggttataactatgtctcctggtaccaacagcacccaggcaaagcccccaaactcatgatttatgatgtcagtaatcggccctcaggggtttctaatcgcttctctggctccaagtctggcaacacggcctccctgaccatctctgggctccaggctgaggacgaggctgattattactgcagctcatatacaagcagcagcacttcttatgtcttcggaactgggaccaaggtcaccgtcctag

SEQ ID NO: 10533 - DNA, 322 bp, Homo sapiens
gacatccagatgacccagtctccatcctccctgtctgcatctgtaggagacagagtcaccatcacttgccaggcgagtcaggacattaacaagtttttaaattggtatcagcagaaaccagggaaagcccctaagctcctgatctacgatgcatccaatttggaaacaggtgtcccctcaaggttcagtggaagtggatctgggacagattttactttcaccatcagcagcctgcagcctgaagatattgcaacatattactgtcaacagtatgataatctccctcggacttttggccaggggaccaagctggagatcaaac

SEQ ID NO: 10534 - DNA, 322 bp, Homo sapiens
gacatccagatgacccagtctccttccaccctgtctgcatctgtaggagacagagtcaccatcacttgccgggccagtcagagtattagtagctggttggcctggtatcagcagaaaccaggaaaagcccctaagctcctaatctctaaggcgtctagtttagaaagtggggtcccatcaaggttcagcgacagtggatctgggacagaattcactctcaccatcagcagcctgcagcctgaagattttgcaacttattactgccaacagtataatagttacccattcactttcggccctgggaccaaagtggatatcaaac

SEQ ID NO: 10535 - DNA, 320 bp, Homo sapiens
gacatccagatgacccagtctccatcctccctgtctgcatctataggagacagagtcaccatcacttgccaggcgagtcaggacattaccaactatttaaattggtatcagcagaaaccagggaaagcccctaagtacctgatctacgatgcgtccagtttggaaacaggggtcccatcaaggttcagtggaagtggatctgggacagattttactttcaccatcagcagcctgcagcctgaagatattgcaacatattactgtcaacagtatgatagtctcccgctcaccttcggccaagggacgcgactggagattaa

SEQ ID NO: 10536 - DNA, 331 bp, Homo sapiens
cagtctgccctgactcagcctgcctccgtgtctgggtctcctggacagtcgatcaccatctcctgcactggaaccaccagtgatgttgggacttataactttgtctcctggtaccaacaccacccaggcaaagcccccaaactcatgatttatgaggtcgttaagcggccctcaggggtttctactcgcttctttggctccaagtctgccaacacggcctccctgacaatttttgggctccaggctgaggacgaggctgattattactgctgctcatatgcaggtagtagcactttggtgttcggcggagggaccaagctgaccgtcctag

SEQ ID NO: 10537 - DNA, 331 bp, Homo sapiens
cagtctgtgctgactcagccaccctcagcgtctgggacccccgggcagagggtcaccatctcttgttctggaagcagctccaacatcggaaataattatgtatactggtaccagcaggtcccaggaacggcccccaaactcctcatctataacaataatcagcggccctcaggggtccctgaccgattctctggctccaagtctggcacctcagcctccctggccatcagtgggctccggtccgaggatgaggctgattattactgtgcaacatgggatgacagcctgagtgcctgggtgttcggcggagggaccaagctgaccgtcctag

SEQ ID NO: 10538 - DNA, 325 bp, Homo sapiens
tcctatgagctgacacagccaccctcggtgtcagtgtccccaggacaaacggccaggatcacctgctctggagatgcattgccaaaaaaatatgcttattggtaccagcagaagtcaggccaggcccctgtgctggtcatctatgaagacaacaaacgaccctccgagatccctgagagattctctggctccagctcagggacaatggccaccttgactatcagtggggcccaggtggaggatgaaggtgactactactgttactcaacacacagcagtgctaatcataggatattcggcggagggaccaagctgaccgtcctag

SEQ ID NO: 10539 - DNA, 328 bp, Homo sapiens
gaaatagtgatgatgcagtctccagccaccctgtctgtgtctccaggggaaagagccaccctctcctgcagggccagtcagagtgttagcagcaacttagcctggtaccagcagaaacctggccaggctcccaggctcctcatctatggtgcatccaccagggccactggcatcccagccaggttcagtggcagtgggtctgggacagagttcactctcaccatcagcagcctgcagtctgaagattttgcagtttattactgtcagcagtataataactggcctccgggaaccaccttcggccaagggacacgactggagattaaac

SEQ ID NO: 10540 - DNA, 325 bp, Homo sapiens
gaaattgtgttgacgcagtctccaggcaccctgtctttgtctccaggggaaagagccaccctctcctgcagggccagtcagagtgttagcagcagctacttcgcctggtaccagcagaaacctggccaggctcccaggctcctcatctatggtgcatccagcagggccactggcatcccagacaggttcagtggcagtgggtctgggacagacttcactctcagtatcagcacactggagcctgaagattttgcagtgtactactgtcagcagtatggtagctcaccgtggacgttcggccaagggaccaaggtggaaatcaaac

SEQ ID NO: 10541 - DNA, 325 bp, Homo sapiens
gaaattgtgttgacgcagtctccaggcaccctgtctttgtctccaggggaaagagccaccctctcctgcagggccagtcagagtgttagcagcagctacttagcctggtaccagcagaaacctggccaggctcccaggctcctcatctatggtgcatccagcagggccactggcatcccagacaggttcagtggcagtgtgtctgggacagacttcactctcaccatcagcagactggagcctgaagattttgcagtgtattactgtcagcagtatggtagctcaccgtggacgttcggccaagggaccaaggtggaaatcaaac

SEQ ID NO: 10542 - DNA, 325 bp, Homo sapiens
gacatccagatgacccagtctccttccaccctgtctgcatctgtaggagacagagtcaccatcacttgccgggccagtcagagtattagtagctggttggcctggtatcagcagaaaccagggaaagcccctaagctcctgatctataaggcgtctagtttagaaagtggggtcccatcaaggttcagcggcagtggatctgggacagaattcactctcaccatcagcagcctgcagcctgatgattttgcaacttattactgccaacagtataatagttattctccgtggacgttcggccaagggaccaaggtggaaatcaaac

SEQ ID NO: 10543 - DNA, 322 bp, Homo sapiens
gacatccagatgacccagtctccatcctccctgtctgcatctgtaggagacagagtcaccatcacttgccgggcaagtcagagcattagcagctatttaaattggtatcagcagaaaccagggaaagcccctaagctcctgatctatgctgcatccagtttgcaaagtggggtcccatcaaggttcagtggcagtggatctgggacagatttcactctcaccatcagcagtctgcaacctgaagattttgcaacttactactgtcaacagagttacagtacccctcccactttcggcggagggaccaaggtggagatcaaac

SEQ ID NO: 10544 - DNA, 325 bp, Homo sapiens
gaaattgtgttgacacagtctccagccaccctgtctttgtctccaggggaaagagccaccctctcctgcagggccagtcagagtgttagcagctacttagcctggtaccaacagaaacctggccaggctcccaggctcctcatctgtgatgcatccaacagggccactggcatcccagccaggttcagtggcagtgggtctgggacagacttcactctcaccatcagcagcctagagcctgaagattttgcagtttattactgtcaacagcgtagcaactggccctcgtacacttttggccaggggaccaagctggagatcaaac

SEQ ID NO: 10545 - DNA, 322 bp, Homo sapiens
gacatccagatgacccagtctccatcctccctgtctgcatctgtaggagacagagtaaccatcacttgccaggcgagtcaggacattagcaagtatttaaattggtatcagcagaaaccagggaaagcccctaagctcctgatctacgatgcatccaatttggaaacaggggtcccatcaaggttcagtggaagtggatctgggacagcttttactttcaccatcagcagcctgcagcctgaagatattgcaacatattactgtcaacaatatgataattccccgatcaccttcggccaagggacacgactggagattaaac

SEQ ID NO: 10546 - DNA, 325 bp, Homo sapiens
gacatccagatgacccagtctccatcctccctgtctgcatctgtaggagacagagtcaccatcacttgccaggcgagtcaggacattaggaattatttaaattggtatcagcagaaaccagggaaagcccctaagctcctgatctacgatgcatccaatttggaaacaggggtcccctcaaggttcagtggaagtggatctgggacggattttacttttaccatcagcagcctgcagcctgaagatattgcaacatattactgtcagcagtatgataatctccctccgtacacttttggccaggggaccaaactggagatcaaac

SEQ ID NO: 10547 - DNA, 334 bp, Homo sapiens
cagactgtggtgactcaggagccctcactgactgtgtccccaggagggacagtcactctcacctgtgcttccagcactggagcagtcaccagtggttactatccaaactggttccagcagaaacctggacaagcacccagggcactgatttatagtacaagcaacaaacactcctggacccctgcccggttctcaggctccctccttgggggcaaagctgccctgacactgtcaggtgtgcagcctgaggacgaggctgagtattactgcctgctctactatggtggtgctcagctttgggtgttcggcggagggaccaagctgaccgtcctag

SEQ ID NO: 10548 - DNA, 331 bp, Homo sapiens
cagtctgccctgactcagcctgcctccgtgtctgggtctcctggacagtcgatcaccatctcctgcactggaaccagcactgatgttgagagttatcaccttgtctcctggtaccagcaacacccaggcaaagccccccaactcatgatttatgaggtcagtaagcggccctcaggggtttctaatcgcttctctggctccaagtctggcaacacggcctccctgacaatctctgggctccaggctgaggacgaggcttcttattactgctgctcatatgcaggtagtagcactttgatgttcggcggagggaccaagctgaccgtcctag

SEQ ID NO: 10549 - DNA, 331 bp, Homo sapiens
cagtctgccctgactcagcctgcctccgtgtctgggtctcctggacagtcgatcaccatgtcctgcacgggaaccagcagtgatgttgggagttattaccttgtctcctggtaccaacagcacccaggcaaagcccccaaactcatgatttatgaggtcagtaagcggccctcaggggtttctaatcacttctctggctccaagtctggcaacacggcctccctgacaatctctgggctccaggctgaggacgaggctgattattactgctgctcatatgcaggtagtagtacttgggtgttcggcggagggaccaaggtgaccgtcctag

SEQ ID NO: 10550 - DNA, 325 bp, Homo sapiens
gaaattgtgttgacgcagtctccaggcaccctgtctttgtctccaggggaaagagccaccctctcctgcagggccagtcagagtgttagcagcaactacttagcctggtaccagcagaaacctggccaggctcccaggctcctcatctatggtgcatccagcagggccactggcatcccagacaggttcagtggcagtgggtctgggacagacttcactctcaccatcagcagactggagcctgaagattttgcagtgtattactgtcagcagtatggtagctcaccgtggacgttcggccaagggaccaaggtggaaatcaaac

SEQ ID NO: 10551 - DNA, 334 bp, Homo sapiens
cagtctgccctgattcagcctccctccgtgtccgggtctcctggacagtcagtcaccatctcctgcactggaaccagcagtgatgttgggagttatgactatgtctcctggttccaacagcacccaggctcagtccccaaacccatgatctacaatgtcaatactcagccctcaggggtccctgatcgtttctctggctccaagtctggcaatacggcctccatggccgcctctggactccaggctgaggacgaggctgatcattagtgctgctcatatacaagcagtgccacttatgtggtattcggcggagggaccaagctgaccgtcctag

SEQ ID NO: 10552 - DNA, 322 bp, Homo sapiens; identical to SEQ ID NO: 1668

SEQ ID NO: 10553 - DNA, 331 bp, Homo sapiens
cagtctgtggtgactcagccaccctcagcgtctgggacccccgggcagagggtcaccatctcttgttctggaagcagctccaacatcggaagtaatactgtaaactggtaccagcagcgcccaggaacggcccccaaactcctcatctgtaatactaatcagcggccctcaggggtccctgaccgattctctggctccaagtctggcacctcagcctccctggccatcagtgggctccagtctgaggatgaggctgattattactgtgcagcatgggatgacagcctgaatggttatgtcttcggaactgggaccaaggtcaccgtcctag

SEQ ID NO: 10554 - DNA, 334 bp, Homo sapiens
cagtctgtgctgactcagccaccctcagcgtctgggacccccgggcagagggtcaccatctcttgttctggaagcagctccaacatcggaagtaatactgtaaactggtaccagcagctcccaggaacggcccccaaactcctcatctatagtaataatcagcggccctcaggggtccctgaccgattctctggctccaagtctggcacctcagcctccctggccatcagtgggctccagtctgaggatgaggctgattattactgtgcagcatgggatgacagcctgaatggtcattgggtgttcggcggagggaccaagctgaccgtcctag

SEQ ID NO: 10555 - DNA, 322 bp, Homo sapiens
gccatccggataacccagtctccatcctcactctctgcatctacaggagacagagtcaccatcacttgtcgggcgagtcagggtattagcagttatttagcctggtatcagcaaaaaccagggaaagcccctaagctcctgatctatgctgcatccactttgcaaagtggggtcccatcaaggttcagcggcagtggatctgggacagatttcactctcaccatcagctgcctgcagtctgaagattttgcaacttattactgtcaacagtattatagttaccctccgacgttcggccaagggaccaaggtggaaatcaaac

SEQ ID NO: 10556 - DNA, 325 bp, Homo sapiens
tcctatgtgctgactcagccgccctcgatgtcagtggccccaggaaagacggccaggattacctgtgggggaaacaactttggatttaaaagtgtgcactggttccagcagaagccaggccaggcccctgtgctggtcgtctatgatgacagcgaccggccctcagggatccctgagcgattctctggctccaactctgggaacacggccaccctgatcatcagcagggtcgaagccggggatgaggccgactattactgtcaggtgtgggatagtattaatgatcatgtgctattcggcggagggaccaagctgaccgtcctag

SEQ ID NO: 10557 - DNA, 331 bp, Homo sapiens
cagtctgtgttgacgcagccgccctcagtgtctgcggccccaggacagaaggtcaccatctcctgctctggaagcagctccaacattgggaataattatgtatcctggtaccagcaactcccaggaacagcccccaaactcctcatctatgaaaataataaacgaccctcagggattcctgaccgattctctggctccaagtctggcacgtcagccaccctgggcatcaccggactccagactggggacgaggccgattattactgcggaacatgggatagcagcctgagtgctgtggtattcggcggagggaccaagctgaccgtcctag

SEQ ID NO: 10558 - DNA, 310 bp, Homo sapiens
gacatccagatgacccagtctccatcctccctgtctgcatctgtaggagacagagtcaccatcacttgccaggcgagtcaggacattagcaactatttaaattggtatcagcagaaaccagggaaagcccctaagctcctgatctacgatgcatccaatttggaaacaggggtcccatcaaggttcagtggaagtggatctgggacagattttactttcaccatcagcagcctgcagcctgaagatattgcaacatattactgtcaacagtatgataatctcctccaggggaccaagctggagatcaaac

SEQ ID NO: 10559 - DNA, 322 bp, Homo sapiens
gacatccagatgacccagtctccatcctcactgtctgcatctgtaggagacagagtcaccatcacttgtcgggcgagtcagggcattagcaattatttagcctggtttcagcagaaaccagggaaagcccctaagtccctgatctatgctgcatccagtttgcaaagtggggtcccatcaaagttcagcggcagtggatctgggacagatttcactctcaccatcagcagcctgcagcctgaagattttgcaacttattactgccaacaacattatacttaccccttcactttcggccctgggaccaaagtggatatcaaac

SEQ ID NO: 10560 - DNA, 331 bp, Homo sapiens
cagtctgccctgactcagcctccctccgcgtccgggtctcctggacagtcagtcaccatctcctgcactggaaccagcagtgacgttggtggttataactatgtctcctggtaccaacagcacccaggcaaagcccccaaactcatgatttatgaggtcagtaagcggccctcaggggtccctgatcgcttctctggctccaagtctggcaacacggcctccctgaccgtctctgggctccaggctgaggatgaggctgattattactgcagctcatatgcaggcagcaacaatttggtattcggcggagggaccaagctgaccgtcctag

SEQ ID NO: 10561 - DNA, 331 bp, Homo sapiens
cagtctgtgttgacgcagccgccctcagtatctgcggccccaggacagaaggtcaccatctcctgctctggaagcagctccaacattgggaataattatgtttcctggtaccagcagatcccaggaacagcccccaaactcctcatctatgaaaataataagcgaccctcagggattcctgaccgattctctggctccaagtctggcacgtcagccaccctgggcatcaccggactccagactggggacgaggccgattattactgcggagcatgggatagcagcctgaatggttgggtgttcggcggagggaccaagctgaccgtcctag

SEQ ID NO: 10562 - DNA, 340 bp, Homo sapiens
gataatgtgatgacccagactccactctctctgtccgtcatccctggacagccggcctccatctcctgcaagtctagtcagagcctcctgcatagtgatggaaagacctatttgtattggtacctgcagaagccaggccagcctccacagctcttgatctatgaagtttccaaccgcttctctggagtgccagataggttcagtggcagcgggtcagggacagatttcacactgaaaatcagccgggtggaggctgaggatgttggggtttattactgcatgcaaagtattcagcttcctccattcactttcggccctgggaccaaagtggatatcaaac

SEQ ID NO: 10563 - DNA, 331 bp, Homo sapiens
cagtctgccctgactcagcctgcctccgtgtctgggtctcctggacagtcgatcaccatctcctgcactggaaccagcagtgatgttgggagttataaccttgtctcctggtaccaacagcacccaggcaaagcccccaaagtcatgatttatgaggtcagtaagcggccctcaggggtttctaatcgcttctctggctccaagtctggcaacacggcctccctgacaatctctgggctccaggctgaggacgaggctgattattactgctgctcatatgcagatagcagcactttcgtcttcggaactgggaccaaggtcaccgtcctag

SEQ ID NO: 10564 - DNA, 308 bp, Homo sapiens
gacatccagatgacccagtctccatcctccctgtctgcatctgtaggagacagagtcaccatcacttgccaggcgagtcaggacatttccaactatttaaattggtatcagcagaaaccagggaaagcccctaagctcctgatctacgatgcatccaatttggaaacaggggtcccatcaaggttcagtggaagtggatctgggacagattttactttcaccatcagcagcctgcagcctgaagatattgcaacatttttctgtcaacaccggggcactttcggcggagggaccaaggtggagatcaa

SEQ ID NO: 10565 - DNA, 322 bp, Homo sapiens
tcttctgagctgactcaggaccctgctgtgtctgtggccttgggacagacagtcaggatcacatgccaaggagacagcctcagaagctattatgcaagctggtaccagcagaagccaggacaggcccctgtagttgtcatctatagtaaaaataaccggccctcagggatcccagaccgattctctggctccagctcaggaaacacagcttccttgaccatcactggggctcaggcggaagatgaggctgactattactgtcactcccgggacagcagtggtaaccttctattcggcggagggaccaagctgaccgtcctag

SEQ ID NO: 10566 - DNA, 322 bp, Homo sapiens
gaaattgtgttgacacagtctccagccaccctgtctttgtctccaggggaaagagccaccctctcctgcagggccagtcagagtgttagcagctacttagcctggtaccaacagaaacctggccaggctcccaggctcctcatctatgatgcatccaacagggccactggcatcccagccaggttcagtggcagtgggtctgggacagacttcactctcaccatcagcagcctagagcctgaagattttgcagtttattactgtcagcagcgtagcaactggcatgccaccttcggccaagggacacgactggagattaaac

SEQ ID NO: 10567 - DNA, 346 bp, Homo sapiens
caggctgtgctgactcagccgtcttccctctctgcatctcctggagcatcagccagtctcacctgcaccttacgcagtggcatcaatgttggtacttacaggatatactggtaccagcagaagccagggagtcctccccagtatctcctgacgtacaaatcagactcagataggcagcggggctctggagtccccagccgcttctctggatccaaagatgcttcggccaatacagggattttactcatctctggactccagtctgaggatgaggctgactattactgtatgatttggcacagcaccgctgtggttttcggcggagggaccaagctgaccgtcctag

SEQ ID NO: 10568 - DNA, 322 bp, Homo sapiens
gacatccagatgacccagtctccatcctccctgtctgcatctgtaggagacagagtcaccatcacttgccgggcaagtcagggcattagaaatgatttagcctggtatcagcagaaaccagggaaagcccctaagcgcctgatctatgctgcatccagtttgcaaagtggggtcccatcaaggttcagcggcagtggatctgggacagaattcactctcacaatcagcagcctgcagcctgaagattttgcaacttattactgtctacagcataatagttaccctcaaacttttggcctggggaccaagctggagatcaaac

SEQ ID NO: 10569 - DNA, 331 bp, Homo sapiens
cagtctgccctgactcagcctgcctccgtgtctgggtctcctggacagtcgattaccatctcctgcactgggaccagcagtgacattggtggttatcactatgtctcctggtaccaacaacacccaggcaacgtccccaaactcttgatttatgatgtcaataaccggccctcaggagtttctactcgcttctctggctccaagtctggcaacacggcctccctgatcatctctcgactccagtctgaggacgaggctgattatttctgcagctcatacacaagcagcaggactttcgttttcggcggagggaccaaggtgaccgtcctag

SEQ ID NO: 10570 - DNA, 337 bp, Homo sapiens
gatattgtgatgacccagactccactctcctcacctgtcacccttggacagccggcctccatctcctgcaggtctagtcaaagcctcgtacacagtgatggaaacacctacttgagttggcttcagcagaggccaggccagcctccaagactcctaatttataagatttctaaccggttctctggggtcccagacagattcagtggcagtggggcagggacagatttcacactgaaaatcagcagggtggaagctgaggatgtcggggtttattactgcatgcaagctacacaatttccctggacgttcggccaagggaccaaggtggaaatcaaac

SEQ ID NO: 10571 - DNA, 337 bp, Homo sapiens
gatattgtgatgacccagactccactctcctcacctgtcacccctggacagccggcctccatctcctgcaggtctagtcaaagcctcgtacacagtgatggaaatacctacttgagttggcttcagcagaggccaggccagcctccaagactcctaatttataagatttctaaccggttctctggggtcccagacagattcagtggcagtggggcagggacagatttcacactgaaaatcagcagggtggaagctgaggatgtcggcgtttattactgcatgcaagctgcacaatttccctggacgttcggccaagggaccaaggtggaaatcaaac

SEQ ID NO: 10572 - DNA, 324 bp, Homo sapiens
gaaattgtgttgacgcagtctccaggcaccctgtctttgtctccaggggaaagagccaccctctcctgcagggccagtcggagtgttagcagcacctacttagcctggtaccagcacaaacctggccaggctcccaggctcctcatctatggtgcatccagcagggccactggcatcccagacaggttcagcggcagtgggtctgggacagacttcacgctcaccatcagcagactggagcctgaagattttgcagtgtattattgtcagcaatatggtagttcaccgtacacttttggccaggggtccaagctggagatcaaa

SEQ ID NO: 10573 - DNA, 331 bp, Homo sapiens
cagtctgtgctgactcagccaccctcagcgtctgggacccccgggcagagggtcaccatctcttcttctggaagcagctccaacatcggaagtaactatgtatactggtaccagcagctcccaggaacggcccccaaactcctcatctataggaataatcagcggccctcaggggtccctgaccgattctctggctccaagtctggcacctcagcctccctggccatcagtgggctccggtccgaggatgaggctgattattactgtgcaacatgggatgacagcctgagtggttgggtgttcggcggagggaccaagctgaccgtcctag

SEQ ID NO: 10574 - DNA, 330 bp, Homo sapiens
cagtctgtgctgactcagccaccctcagcgtctgggacccccgggcagagggtcaccatctcttgttctggaagcagctccaacatcggaattaatttggtatactggtaccagcagctcccaggaacggcccccaaactcctcatctataggaatgatcagcggccctcaggggtccctgaccgattctctggctccaagtctggcacttcagcctccctggccatcagtgggctccggtccgaggatgaggctgattattactgtacaacatgggatgacagcctgagtggttgggtgttcggcggagggaccaagctgaccgtccta

SEQ ID NO: 10575 - DNA, 319 bp, Homo sapiens; identical to SEQ ID NO: 1688

SEQ ID NO: 10576 - DNA, 319 bp, Homo sapiens
tcctatgagctgactcagccaccctcagtgtccgtgtccccaggacagacagccagcatcacctgctctggacataaattgggggataaatatgcttgctggtatcagcagaagccaggccagtcccctgtggtggtcatctatgaagataccaagcggccctcagggatccctgagcgattctctggctccaactctgggaacacagccactctgaccatcagcgggacccaggctgtggatgaggctgactattactgtcaggcgtgggacagcagcactgcgctattcggcggagggaccaagctgaccgtcctag

SEQ ID NO: 10577 - DNA, 334 bp, Homo sapiens; identical to SEQ ID NO: 1692

SEQ ID NO: 10578 - DNA, 322 bp, Homo sapiens
gacatccagatgacccagtctccatcctccctgtctgcatctgtaggagacagagtcaccatcacttgccgggcaagtcaggacattagaagtgatttagcctggtatcagcaaaaaccagggaaagcccctaagcgcctgatctatgctgcatccagtttgcaaagtggggtcccatcaaggttcagcggcagtggatctgggacagaattcactctcacaatcagcagcctgcagcctgaagattttgcaacttattactgtctacagcataatagttaccctcaaacttttggccaggggaccaggctggagatcaaac

SEQ ID NO: 10579 - DNA, 325 bp, Homo sapiens
tcctatgtgctgactcagccaccctcggtgtcagtggccccaggaaagacggccaggattacctgtgggggaaacaacattggaagtaaaagtgtgcactggtaccagcagaagccaggccaggcccctgtactggtcgtctatgatgatagcgaccggccctcagggatccctgagcgattctctggctccaactctgggaacacggccaccctgaccatcagcagggtcgaagccggggatgaggccgactattactgtcaggtgtgggatagtagtagtgatctcgtggtattcggcggagggaccaagctgaccgtcctag

SEQ ID NO: 10580 - DNA, 334 bp, Homo sapiens
cagtctgtgctgacgcagccgccctcagtgtctggggccccagggcagagggtcaccatttcctgcactgggagcagctccaacatcggggcaggttatgatgtacactggtaccagcagcttccaggaacagcccccaaactcctcatctatggtaacagcaatcggccctcaggggtccctgaccgattctctggctccaagtctggcacctcagcctccctggccatcactgggctccaggctgaggatgaggctgattattactgccagtcctatgacagcagcctgagtggtgtggtattcggcggagggaccaagctgaccgtcctag

SEQ ID NO: 10581 - DNA, 322 bp, Homo sapiens
gacatccagatgacccagtctccttccaccctgtctgcatctgtaggagacagagtcaccatcacttgccgggccagtcagagtattagtagctggttggcctggtatcagcagaaaccagggaaagcccctaagctcctgatctataaggcatctagtttagaaagtggggtcccatcaaggttcagcggcagtggatctgggacagaattcactctcaccatcagcagcctgcagcctgatgattttgcaacttattactgccaacagtataatagttatccgtacacttttggccaggggaccaagctggagatcaaac

SEQ ID NO: 10582 - DNA, 332 bp, Homo sapiens
cagtctgccctgactcagcctgcctccgtgtctgggtctcctggacagtcgatcaccatctcctgcactggaaccagcagagacgttggtggacataactatgtctcctggtatcaacaacacccaggcaaagcccccaaactcatgatttatgatgtcagtaatcggccctcaggggtttctaatcgcttctctggctccaagtctggcaacacggcctccctgaccatctctgggctccaggctgaggacgaggctgattattactgcagctcatatacaaccagtcgcactgttgtggtcttcggaactgggaccaaggtcaccgtcct

SEQ ID NO: 10583 - DNA, 346 bp, Homo sapiens
caggctgtgctgactcagccgtcttccctctctgcatctcctggagcatcagccagtctcacctgcacctttcgcagtggcatcaatgttggtacctacaggatatactggtaccagcagaagccagggagtcctccccagtatctcctgacgtacaaatcagactcagataagcagcggggctctggagtccccagccgcttctctggatccaaagatgcttcggccaatgcagggattttactcatctctgggctccagtctgaggatgaggctgactattactgcatgatttggcacagcaggtcttgggtgttcggcggagggaccaagctggccgtcctag

SEQ ID NO: 10584 - DNA, 331 bp, Homo sapiens; identical to SEQ ID NO: 874

SEQ ID NO: 10585 - DNA, 325 bp, Homo sapiens
gaaatagtgatgacgcagtctccagccaccctgtctgtgtctccaggggaaagagccaccctctcctgcagggccagtcagagtgttagcagcaacttagcctggtaccagcagaaacctggccaggctcccaggctcctcatctatggtgcatccaccagggccactggtatcccagccaggttcagtggcagtgggtctgggacagagttcactctcaccatcagcagcctgcagtctgaagattttgcagtttattactgtcagcagtataataactggcctgggggaacgttcggccaagggaccaaggtggaaatcaaac

SEQ ID NO: 10586 - DNA, 328 bp, Homo sapiens
gaaattgtgttgacacagtctccagccaccctgtctttgtctccaggggaaagagccaccctctcctgcagggccagtcagagtgttagcagctacttagcctggtaccaacagaaacctggccaggctcccaggctcctcatctatgatgcatccaacagggccactggcatcccagccaggttcagtggcagtgggtctgggacagacttcactctcaccatcagcagcctagagcctgaagattttgcagtttattactgtcagcagcgtagcaactggcctccgagtatcaccttcggccaagggacacgactggagattaaac

SEQ ID NO: 10587 - DNA, 334 bp, Homo sapiens
cagcttgtactgactcaatcgccctctgcctctgcctccctgggagcctcggtcaagctcacctgcactctgagcagtgggcacagcagctacgccatcgcatggcatcagcagcagccagagaagggccctcgcttcttgatgaacattaacagtgatggcagccacaagaagggggacgggatccctgatcgcttctcaggctccagctctggggctgagcgctacctcaccatctccagcctccagtctgaggatgaggccgactattactgtcagacctggggcgttggcattcgggtgttcggcgcagggaccaagctgaccgtcctag

SEQ ID NO: 10588 - DNA, 322 bp, Homo sapiens
gacatccagttgacccagtctccatccttcctgtctgcatctgtaggagacagagtcaccatcacttgccgggccagtcagggcattagcagttatttagcctggtatcagcaaaaaccagggaaagcccctaagctcctgatctatgctgcatccactttgcaaagtggggtcccatcaaggttcagcggcagtggatctgggacagatttcactctcaccatcagctgcctgcagtctgaagattttgcaacttattactgtcaacagtattatagttaccctcgcacttttggccaggggaccaagctggagatcaaac

SEQ ID NO: 10589 - DNA, 325 bp, Homo sapiens
gaaattgtgttgacgcagtctccaggcaccctgtctttgtctccaggggaaagagccaccctctcctgcagggccagtcagagtgttagcagcacctacttagcctggtaccagcaaaaacctggccaggctcccaggctcctcatctatggtgcatccagcagggccacgggcatcccagacaggttcagtggcagtgggtctgggacagacttcactctcaccatcagcagactggagcctgaagattttgcagtgtattactgtcagcagtatggtagctcaccgtggacgttcggccaagggaccaaggtggaaatcaaac

SEQ ID NO: 10590 - DNA, 345 bp, Homo sapiens
gacatcgtgatgacccagtctccagactccctggctgtgtctctgggcgagagggccaccatcaactgcaagtccagccagagtgttttatacagctccaacaataagaactacttagcttggtaccagcagaaaccaggacagcctcctaagctgctcatttactgggcatctacccgggaatccggggtccctgaccgattcagtggcagcgggtctgggacagatttcactctcaccatcagcagcctgcaggctgaagatgtggcagtttattactgtcagcaatattatagtactcctccttattcactttcggccctgggaccaaagtggatatcaaac

SEQ ID NO: 10591 - DNA, 331 bp, Homo sapiens
cagtctgtgctgactcagccaccctcagcgtctgggacccccgggcagagggtcaccatctcttgttctggaagcaggtccaacatcggaagcagtactataagttggtaccagcagctcccgggaacggcccccaaactcctcatccacagtaataatcagcggccctcaggggtccctgaccgattctctggctccaagtctggcacctcagtctccctggccatcagtgggctccagtctgaggatgaggctgattattactgtgcagcatgggatgacagtctgaatgtctgggtgttcggcggagggaccaagctgaccgtcctag

SEQ ID NO: 10592 - DNA, 325 bp, Homo sapiens
gacatccagatgacccagtctccatcctccctgtctgcatctgtaggagacagagtcaccatcacttgccgggcaagtcataccattagcaggtatttaaattggtatcagcagaaaccagggaaagcccctaaactcctgatctatgctgcatccagtttgcaaagtggggtcccatcaaggttcagtggcagtggatctgggacagatttcactctcaccatcagcagtctgcaacctgaagattttgcaacttactactgtcaacagagttacagtaccctcacgtggacgttcggccaagggaccaaggtggaaatcaaac

SEQ ID NO: 10593 - DNA, 334 bp, Homo sapiens
cagtctgtactgactcagtcaccctcagcgtctgggacccccgggcagagggtcaccatctcttgttctggaagcacctccaacatcggaagtaattatgtatattggtaccagcagctcccaggaacggcccccaaactcctcatctataggaataatcagcggccctcaggggtccctgaccgattctctggctccaagtctgccacctcagcctccctggccatcagtgggctccggtccgaggatgaggctgattattactgtgcagcatgggataacagcccgagtggccgttatgtcttcggaactgggaccaaggtcaccgtcctag

SEQ ID NO: 10594 - DNA, 331 bp, Homo sapiens
tcctatgtgctgactcagccaccctcggtgtcagtggccccaggaaagacggccaggattacctgtgggggagataacattggaagcaaaagtgtgcactggtaccagcagaagccaggccaggcccctgtactggtcgtctatgatgatagcgaccggccctcagggatccctgagcgattctctggctccaactctgggaacacggccaccctgaccatcagcagggtcgaagccggcgatgaggccgactattactgtcaggtgtgggatactaggagtctcaccctagatgtggttttcggcggagggaccaagctgaccgtcctag

SEQ ID NO: 10595 - DNA, 325 bp, Homo sapiens
gccatccggataacccagtctccatcctcactctctgcatctacaggagacagagtcaccatcacttgtcgggcgagtcagggtattagcagttatttagcctggtatcagcaaaaaccagggaaagcccctaagctcctgatctatgctgcatccactttgcaaagtggggtcccatcaaggttcagcggcagtggatctgggacagatttcactctcaccatcagctgcctgcagtctgaagattttgcaacttattactgtcaacagtattatagttacccctcgtcgacgttcggccaagggaccaaggtggaaatcaaac

SEQ ID NO: 10596 - DNA, 331 bp, Homo sapiens
caggctgtggtgactcaggagccctcactgactgtgtccccaggagggacagtcactctcacctgtggctccagcactggagctgtcaccagtggtcattatccctactggttccagcagaagcctggccaagcccccaggacactgatttctgatacaagcgacaaacactcctggacccccgcccggttctcaggctccctccttgggggcaaagctgccctgaccctttcgggtgcgcagcctgaggatgaggctgactattactgcttgctctcctatggtggtgctcggggggtgttcggcggagggaccaagctgaccgtcctag

SEQ ID NO: 10597 - DNA, 328 bp, Homo sapiens
tcctatgtgctgactcagccaccctcggtgtcagtggccccaggaaagacggccaggattacctgtgggggaaacaacattggaagtaaaagtgtgcactggtaccagcagaagccaggccaggcccctgtgctggtcgtctatgatgatagcgaccggccctcagggatccctgagcgattctctggctccaactctgatcacacggccaccctgaccatcagcagggtcgaagccggggatgaggccgactattactgtcaggtgtgggatagtagtagtgatcatcttgtggtattcggcggagggaccaagctgaccgtcctag

SEQ ID NO: 10598 - DNA, 325 bp, Homo sapiens
gaaattgtgttgacgcagtctccaggcaccctgtctttgtctccaggggaaagagccaccctctcctgcagggccagtcagagtgttagcagcagctacttagcctggtaccaacagaaacctggccaggctcccaggctcctcatctatggtgcatccagcagggccactggcatcccagacaggttcagtggcagtgggtctgggacagacttcactctcaccatcagcagactggagcctgaagattttgcagtgtattactgtcagcagtatggtctctcaccattcactttcggccctgggaccaaagtggatgtcaaac

SEQ ID NO: 10599 - DNA, 322 bp, Homo sapiens
gacatccagatgacccagtctccatcctccctgtctgcatctgtaggagacagagtcaccatcacttgccgggcaagtcagagcattagcagctatttaaattggtatcagcagaaaccagggaaagcccctaagctcctgatctatgctgcatccagtttgcaaagtggagtcccatcaaggttcagtggcagtggatctgggacagatttcactctcaccatcagcattctgcaacctgaagattttgcaacttactactgtcaacagagttacagtaccccgtacacttttggccaggggaccaagctggagatcaaac

SEQ ID NO: 10600 - DNA, 325 bp, Homo sapiens
tcctatgtgctgactcagccaccctcagtgtcagtggccccaagagagacggccaggattacctgtgggggagccaacattggaagtaaaagtgtgcactggtaccagcagaagccaggccaggcccctgtgctggtcatctattatgatagcgaccggccctcagggatccctgagcgattctctggctccaactctgggagcacggccaccctgaccatcagcagggtcgaagccggggatgaggccgactattactgtcaggtgtgggatagtagtagtgatcatgtgatattcggcggagggaccaagctgaccgtcctag

SEQ ID NO: 10601 - DNA, 337 bp, Homo sapiens
gacatcgtgatgacccagtctccagactccctggctgtgtctctgggcgagagggccaccatcaactgcaagtccagccagagtgttttatacagctccaacaataagaactacttagcttggtaccagcagaaaccaggacagcctcctaagctgctcatttactgggcatctacccgggaatccggggtccctgaccgattcagtggcagcgggtctgggacagatttcactctcaccatcagcagcctgcaggctgaagatgtggcagtttattactgtcagcaatattatagtacttacacttttggccaggggaccaagctggagatcaaac

SEQ ID NO: 10602 - DNA, 325 bp, Homo sapiens
gacatccagatgacccagtctccatcctccctgtctgcatctgtaggagacagagtcaccatcacttgccgggcaagtcagagcattaacaattatttaaattggtatcagctgaaaccagggaaagcccctaagctcctgatctatgctgcatccagtttgcaaaatggggtcccatcaaggttcagtggcagtggatctgggacagatttcactctcaccatcagcagtctgcaacgtgaagattttgcaacttactactgtcaacagagttacagtactcctccgtacacttttggccaggggaccaagctggagatcaaac

SEQ ID NO: 10603 - DNA, 322 bp, Homo sapiens; identical to SEQ ID NO: 2296

SEQ ID NO: 10604 - DNA, 325 bp, Homo sapiens
gaaattgtgttgacgcagtctccaggcaccctgtctttgtctccaggggaaagagccaccctctcctgcagggccagtcagagtgttagcagcagctacttagcctggtaccagcagaaacctggccaggctcccaggctcctcatctatggtgcatccagcagggccactggcatcccagacaggttcagtggcagtgggtctgggacagacttcactctcaccatcagcagactggagcctgaagattttgcagtgtattactgtcagcagtatggtagctcacctcccactttcggcggagggaccaaggtggagatcaaac

SEQ ID NO: 10605 - DNA, 325 bp, Homo sapiens
gaaattgtgttgacgcagtctccaggcaccctgtctttgtctccaggggaaagagccaatttctcctgcagggccagtcagagtgttagcagcagctacttagcctggtaccagcagaaacctggccaggctcccaggctcctcatttatggtgcatccagcagggccactggcatcccagacaggttcagtggcagtgggtctgggacagacttcactctcaccatcagcagactggagcctgaagattttgcagtgtattactgtcagcagtatggtagctcaccgtacacttttggccaggggaccaagctggagatcaaac

SEQ ID NO: 10606 - DNA, 325 bp, Homo sapiens; identical to SEQ ID NO: 2297

SEQ ID NO: 10607 - DNA, 319 bp, Homo sapiens
gacatccagatgacccagtctccatcctccctgtctgcatctgtaggagacagagtcaccatcacttgccaggcgagtcaggacattagcaactatttaaattggtatcagcagaaaccagggaaagcccctaagctcctgatctacgatgcatccaatttggaaacaggggtcccatcaaggttcagtggaagtggatctgggacagattttactttcaccatcagcagcctgcagcctgaagatattgcaacatattactgtcaacagtatgataatctccctccttttggccaggggaccaagctggagatcaaac

SEQ ID NO: 10608 - DNA, 334 bp, Homo sapiens
cagtctgccctgactcagcctgcctccgtgtctgggtctcctggacagtcgatctccatctcctgcactggaaccagcagtgacattggtacttataactatgtctcctggtaccaacagcacccaggcaaagcccccaaactcatcgtttttgatgtcagtgatcggccctcaggggtttctaatcgcttctctggctccaagtctggcaacacggcctccctgaccatctctgggctccaggctgaggacgaggctgattattactgcagctcatatacaagcagcaacactcttgtggtgttcggcggagggaccaagctgaccgtcctag

SEQ ID NO: 10609 - DNA, 322 bp, Homo sapiens; identical to SEQ ID NO: 2418

SEQ ID NO: 10610 - DNA, 322 bp, Homo sapiens
tcctatgagctgactcagccaccctcagtgtccgtgtccccaggacagacagccagcatcacctgctctggagataaattgggggataaatatgcttgctggtatcagcagaagccaggccagtcccctgtgctggtcatctatcaagatagcaagcggccctcagggatccctgagcgattctctggctccaactctgggaacacagccactctgaccatcagcgggacccaggctatggatgaggctgactattactgtcaggcgtgggacagcagcactccttatgtcttcggaactgggaccaaggtcaccgtcctag

SEQ ID NO: 10611 - DNA, 318 bp, Homo sapiens
cctatgaactgactcagccaccctcagtgtccgtgtccccaggacagacagccagcatcacctgctctggagataaattgggggataaatatgcttgctggtatcagcagaagtcaggccagtcccctgtgctggtcatctatcaagataccaagcggccctcagggatccctgagcgattctctggctccaactctgggaacacagccactctgaccatcagcgggacccaggctatggatgaggctgactattactgtcaggcgtgggacagcagcactgctgtcttcggaactgggaccaaggtcaccgtcctag

SEQ ID NO: 10612 - DNA, 319 bp, Homo sapiens
tcccttgagctgactcagccaccctcagtgtccgtgtccccaggacagacagccagcatcacctgctctggagataaattgggggataaatatgcttcctggtatcaacagaggccaggccagtcccctgtactggtcatctatcaagataccaagcggccctcagggatccctgaacgattctctggctccaactctgggaacacagccactctgaccatcagcgggacccaggctatggatgaggctgactattactgtcaggcgtgggacagtagcactgcggtattcggcggagggaccaagctgaccgtcctag

SEQ ID NO: 10613 - DNA, 346 bp, Homo sapiens
caggctgtgctgactcagccgtcttccctctctgcatctcctggagcatcagccagtctcacctgcaccttacgcagtggcatcaatgttggtacctacaggatatactggtaccagcagaagccagggagtcctccccagtatctcctgaggtacaaatcagactcagataagcagcagggctctggagtccccagccgcttctctggatccaaagatgcttcggccaatgcagggattttactcatctctgggctccagtctgaggatgaggctgactattactgtatgatttggcacagcagcgcttatgtcttcggaactgggaccaaggtcaccgtcctag

SEQ ID NO: 10614 - DNA, 334 bp, Homo sapiens
cagtctgccctgactcagcctcgctcagtgtccgggtctcctggacagtcagtcaccatctcctgcactggaaccagcagtgatgttggtggttataactatgtctcctggtaccaacagcacccaggcaaagcccccaaactcatgatttatgatgtcagtaagcggccctcaggggtccctgatcgcttctctggctccaagtctggcaacacggcctccctgaccatctctgggctccaggctgaggatgaggctgattattactgctgctcatatgcaggcagctacattaattgggtgttcggcggagggaccaagctgaccgtcctag

SEQ ID NO: 10615 - DNA, 316 bp, Homo sapiens
tcctatgtactgactcagccaccctcagtgtcagtggccccaggaaagacggccaggattacctgtgggggaaacaacattggaagtaaaagtgtgcactggtaccagcagaagccaggccaggcccctgtgttggtcatctattatgatagcgaccggccctcagggatccctgagcgactctctggctccaactctgggaacacggccaccctgaccatcagtagggtcgaagccggagatgaggccgactatttctgtcaggtttgggatatgggtgtggtgttcggcggagggaccaagctgaccgtcctag

SEQ ID NO: 10616 - DNA, 322 bp, Homo sapiens
gacatccagatgacccagtctccatcctccctgtctgcatctgtaggacacagagtcaccatcacttgccgggcaagtcagagcattagtaggtatttaaattggtatcagcagaaaccagggaaagcccctaaggtcctgatctatgctgcatccagtttgcaaagtggggtcccatcaaggttcagtggcagtggatctgggacagatttcactctcaccatcagcagtctgcaacctgaagattttgcaacttactactgtcaacagagttacagtacccctcggacgttcggccaagggaccaaggtggaaatcaaac

SEQ ID NO: 10617 - DNA, 340 bp, Homo sapiens
gacatcgtgatgacccagtctccagactccctggccgtgtctctgggcgagagggccaccatcaactgcaagtccagccagagggttgtatacacctccaacaataagaactccttagcttggtaccagcagaaaccaggacagcccccgaagctggtcatttcctgggcatctacccgggcatccggggtccctgaccggttcagtggcagcgggtctgggacagatttcactctcaccatcagcagcctgcaggctgaagacgtggcagtttattactgtcagcagtattttagtaccccgtacacttttggccaggggaccaagctggagatcaaac

SEQ ID NO: 10618 - DNA, 325 bp, Homo sapiens
tcctatgtgctgactcagccaccctcagtgtcagtggccccaggaaagacggccaggataacctgtgggggaaacaatattggaagtaaaagtgtgcactggtaccagcagaagtcaggccaggcccctgtgttggtcatctattatgattccgcccggccctcagggatccctgagcgattctctggcttcaactctgggaacacggccaccctgaccatcgacagggtcgaagccggggatgaggccgactattactgtcaggtgtgggatagtagtagtgatcagggggtattcggcggagggaccaagctgaccgtcctag

SEQ ID NO: 10619 - DNA, 325 bp, Homo sapiens
gacatccagatgacccagtctccatcctccctgtctgcatctgtaagagacagagtcaccatcacttgccaggcgagtcaggacattagcaactttttaagttggtatcagcagaaaccagggaaagcccctaagctcctgatctacgatgcatccaatttggaaacaggggtcccatcaaggttcagtggaagtggatctgggacagagtttactttcaccatcagcagcctgcagcctgaagatattgcaacatattactgtcaacagtatgataatctccctccgtacacttttggccaggggaccaaactggagatcaaac

SEQ ID NO: 10620 - DNA, 322 bp, Homo sapiens
gaaattgtgttgacgcagtctccaggcaccctgtctttgtctccaggggaaagaggcaccctctcctgcagggccagtcagagtgttagcagcagctacttagcctggtaccagcagaaacctggccaggctcccaggctcctcatctatgatgcatccagcagggccactggcatccccgacaggttcagtggcagtgggtctgggacagacttcactctcaccatcagcagactggaccctgaagattttgcagtgtattactgtcagcagtatggtaggtcgtggacgttcggccaagggaccaaggtggaaatcaaac

SEQ ID NO: 10621 - DNA, 334 bp, Homo sapiens
cagtctgccctgactcagcctgcctccgtgtctgggtctcctggacagtcgatcaccatctcctgcactggaaccagcagtgacgttggtggttataactatgtctcctggtaccaacagcacccaggcaaagcccccaaactcatgatttatgatgtcagtaatcggccctcaggggtttctaatcgcttctctggctccaagtctggcaacacggcctccctgaccatctctgggctccaggctgaggacgaggctgattattactgcagctcatatacaagcagcagcactccctgggtgttcggcggagggaccaagctgaccgtcctag

SEQ ID NO: 10622 - DNA, 331 bp, Homo sapiens
cagtctgccctgactcagcctgcctccgtgtctgggtctcctggacagtcgatcaccatctcctgcactggaaccagcagtgatgttgggagttataaccttgtctcctggtaccaacagcacccaggcaaagcccccaaactcatgatttatgaggtcagtaagcggccctcaggggtttctaatcgcttctctggctccaagtctggcaacacggcctccctgacaatctctgggctccaggctgaggacgaggctgattattactgctgctcatatgcaggtagtagcacttttgtcttcggaactgggaccaaggtcaccgtcctag

SEQ ID NO: 10623 - DNA, 319 bp, Homo sapiens; identical to SEQ ID NO: 3275

SEQ ID NO: 10624 - DNA, 331 bp, Homo sapiens
cagtctgtgttgacgcagccgccctcagtgtctgcggccccaggacagaaggtcaccatctcctgctctggaaccagctccaacattgggaataattatgtatcctggtaccagcaactcccaggaacagcccccaaactcctcatctatgaagatgataagcgaccctcagggattcctgaccgattctctggctccaagtctggcacgtcagccaccctgggcatcaccggactccagactggggacgaggccgattattactgcggaacatgggatagcagcctgagtgccgtggtattcggcggagggaccaagctgaccgtcctag

SEQ ID NO: 10625 - DNA, 334 bp, Homo sapiens
cagcttgtgctgactcaatcgccctctgcctctgcctccctgggagcctcggtcaagctcacctgcactctgagcagtgggcacagcagctacgccatcgcatggcatcagcagcagccagagaagggccctcggtacttgatgaagcttaacagtgatggcagccacagcaagggggacgggatccctgatcgcttctcaggctccagctctggggctgagcgctacctcaccatctccagcctccagtctgaggatgaggctgactattactgtcagacctggggcactggcattcaagtattcggcggagggaccaagctgaccgtcctag

SEQ ID NO: 10626 - DNA, 325 bp, Homo sapiens
tcttctgagctgactcaggaccctgctgtgtctgtggccttgggacagacagtcaggatcacatgccaaggagacagcctcagaagctattatgcaagctggtaccagcagaagccaggacaggcccctgtagttgtcatctatggtaaaaacaaccggccctcagggatcccagaccgattctctggctccagctcaggaaacacagcttccttgaccatcactggggctcaggcggaagatgaggctgactattactgtcactcccgggacagcagtggtaaccattatgtcttcggaactgggaccaaggtcaccgtcctag

SEQ ID NO: 10627 - DNA, 331 bp, Homo sapiens
cagtctgccctgactcagcctcgctcagtgtccgggtctcctggacagtcagtcaccatctcctgcactggaaccaacagtgatgttggtggttataactatgtctcctggtaccaacaactcccaggcaaagcccccaaactcatgatttatgatgtcagtaagcggccctcaggggtccctgatcgcttctctggctccaagtctggcaacacggcctccctgaccatctctgggctccaggctgaggatgaggctgattattactgctgctcgtatgcaggcagctacacttgggtgttcggcggagggaccaagctgaccgtcctag

SEQ ID NO: 10628 - DNA, 328 bp, Homo sapiens
gacatccagatgacccagtctccatcctccctgtctgcatctgtaggagacagagtcaccatcacttgccgggcgagtcagggcattagcaattatttagcctggtatcagcagaaaccagggaaagttcctaagctcctgatctatgctgcatccactttgcaatcaggggtcccatctcggttcagtggcagtggatctgggacagatttcactctcaccatcagcagcctgcagcctgaagatgttgcaacttattactgtcaaaagtataacagtgcccctccgaggctcactttcggcggagggaccaaggtggagatcaaac

SEQ ID NO: 10629 - DNA, 325 bp, Homo sapiens
tcctatgtgctgactcagccaccctcggtgtcagtggccccaggaaagacggccaggattacctgtgggggaaacaacattggaagtaaaagtgtgcactggtaccagcagaagccaggccaggcccctgtgctggtcgtctatgatgatagcgaccggccctcagggatccctgagcgattctctggctccaactctgggaacacggccaccctgaccatcagcagggtcgaagccggggatgaggccgactattactgtcaggtgtgggatagtagtagtgatcatggggtgttcggcggagggaccaagctgaccgtcctag

SEQ ID NO: 10630 - DNA, 322 bp, Homo sapiens; identical to SEQ ID NO: 3554

SEQ ID NO: 10631 - DNA, 331 bp, Homo sapiens
cagtctgccctgactcagcctgcctccgtgtctgggtctcctggacaatcgatcaccatctcctgcactggaaccagcagtgacgttggtggttataactctgtctcctggtaccaacagtacccaggcaaagcccccaaactcatgatttatgatgtcagtaatcggccctcaggggtttctgatcgcttgtctggctccaagtctgccaacacggcctccctgaccatctctgggctccaggctgaggacgaggctgattattactgcagctcatctacaagcagcagttctgtgatattcggcgcagggaccaagctgaccgtcctag

SEQ ID NO: 10632 - DNA, 322 bp, Homo sapiens
gacatccagatgacccagtctccttccaccctgtctgcatctgtaggagacagcgtcaccatcacttgccgggccagtcagagtattggtacctggttggcctggtatcagcagaaaccagggaaagcccctaaactcctgatgtatacggcatctaaattagaaagtggggtcccatcaaggttcagcggcagtggatctgggacagaattcactctcaccatcagcagcctgcagcctgatgattttgcaacttattactgccaacagtataatagttacccgtggacgttcggccaagggaccaaggtggaaatcaaac

SEQ ID NO: 10633 - DNA, 322 bp, Homo sapiens
gacatccagatgacccagtctccatcctcactgtctgcatctgtaggagacagagtcaccatcacttgtcgggcgagtcagggcatctacaattatttagcctggtttcagcagaaaccagggaaagcccctaagtccctgatctatgctgcatccagtttgcaaagtggggtcccatcaaagttcagcggcagtggatctgggacagatttcactctcaccatcagcagcctgcagcctgaagattttgcaacttattactgccaacagtataatagttaccctcgaacgttcggccaagggaccaaggtggaaatcaaac

SEQ ID NO: 10634 - DNA, 331 bp, Homo sapiens
aattttatgctgactcagccccactctgtgtcggagtctccggggaagacgataaccatctcctgcacccgcagcagtggctacattgccagcaactatgtgcagtggtaccagcagcgcccgggcagttcccccaccactgtgatctatgaggataaccaaagaccctctggggtccctgatcggttctctggctccatcgacagctcctccaactctgcctccctcaccatctctggactgaagactgaggacgaggctgactactactgtcagtcttatgaaagcaactcttgggtgttcggcggagggaccaagctgaccgtcctag

SEQ ID NO: 10635 - DNA, 322 bp, Homo sapiens; identical to SEQ ID NO: 10543

SEQ ID NO: 10636 - DNA, 325 bp, Homo sapiens; identical to SEQ ID NO: 999

SEQ ID NO: 10637 - DNA, 325 bp, Homo sapiens
gaaattgtgttgacacagtctccagccaccctgtctttgtctccaggggaaagagccaccctctcctgcagggccagtcagagtgttagcagctacttagcctggtaccaacagaaacctggccaggctcccaggctcctcatctatgatgcatccaacagggccactggcatcccagccaggttcagtggcagtgggtctgggacagacttcactctcaccatcagcagcctagagcctgaagattttgcagtttattactgtcagcagcgtagcaactggccttctctcactttcggcggagggaccaaggtggagatcaaac

SEQ ID NO: 10638 - DNA, 325 bp, Homo sapiens
gaaattgtgttgacgcagtctccaggcaccctgtctttgtctccaggggaaagagccaccctctcctgcagggccagtcagagtgttagcagcagctacttagcctggtaccagcagaaacctggccaggctcccaggctcctcatctatggtgcatccagcagggccactggcatcccagacaggttcagtggcagtgggtctgggacagacttcactctcaccatcagcagactggagcctgaagattttgcagtgtattactgtcagcagtatggtagctcacagtacacttttggccaggggaccaagctggagatcaaac

SEQ ID NO: 10639 - DNA, 331 bp, Homo sapiens
aattttatgttgactcagccccactctgtgtcggagtctccggggaagacggtaaccatctcctgcacccgcagcagtgacagcattgccagcaactatgtgcagtggtaccagcagcgcccgggcagttcccccaccactgtgatctatgaggataaccaaagaccctctggggtccctgatcggttctctggctccatcgacagctcctccggctctgcctccctcaccatctctggactgaggactgaggacgaggctgactactactgtcagtcttatgaaagcagctattgggtgttcggcggagggaccaagctgaccgtcctag

SEQ ID NO: 10640 - DNA, 319 bp, Homo sapiens
gacatccagatgacccagtctccatcctcactgtctgcatctgtaggagacagagtcaccatcacttgccgggcaagtcagagcattaacaggtatttaaattggtatcagcagaaaccagggaaagcccctaagctcctgatctataaggcgtccagtttagaaagtggggtcccatcaaggttcagcggcagtggatctgggacagaattcactctcaccatcagcagcctgcagcctgatgattttgcaacttattattgccaacagtataatagttacccctacacttttggccaggggaccaagctggagatca

SEQ ID NO: 10641 - DNA, 322 bp, Homo sapiens; identical to SEQ ID NO: 4679

SEQ ID NO: 10642 - DNA, 322 bp, Homo sapiens; identical to SEQ ID NO: 9319

SEQ ID NO: 10643 - DNA, 322 bp, Homo sapiens
gacatccagatgacccagtctccttccaccctgtctgcatctgtaggagacagagtcaccatcacttgccgggccagtcagagtattagtaggtggttggcctggtatcagcagaaaccagggaaagcccctaaggtcctgatctataaggcgtctagtttagaaagtggggtcccatcaaggttcagcggcagtggatctgggacagaattcagtctcaccatcagcagcctgcagcctgatgattttgcaacttattactgccaacagtataataattattctccgacgttcggccaagggaccaaggtggaaatcaaac

SEQ ID NO: 10644 - DNA, 325 bp, Homo sapiens
gacatccagttgacccagtctccatccttcctgtctgcatctgtaggagacagagtcaccatcacttgccgggccagtcagggcattagcagttatttagcctggtatcagcaaaaaccagggaaagcccctaagctcctgatctatgctgcatccactttgcaaagtggggtcccatcaaggttcagcggcagtggatctgggacagaattcactctcacaatcagcagcctgcagcctgaagattttgcaacttattactgtcaacagcttgatacttaccctggggtcaccttcggccaggggacacgactggagattaaac

SEQ ID NO: 10645 - DNA, 313 bp, Homo sapiens
gagattgtgttgacgcagtctccaggcaccctgtctttgtctccaggggaaagagccaccgtctcctgcagggccagtcagagtgttgacagcagttacttagcctggtaccagcagaaacctggccaggctcccaggctcctcatctatggtgcatccaccagggccactggcatcccagtcaggttcagtggcggagggtctggaacagacttcactctcaccatcagcagactggagcctgaagattttgcagtgtattactgtcagcattccgagactttcggccctgggaccaaagtggatatcaaac

SEQ ID NO: 10646 - DNA, 334 bp, Homo sapiens
cagtctgccctgactcagtctccctccgcgtccgggtctcctggacagtcagtcaccatctcctgcactggaaccagcagtgacgttggtggtaattcttatgtctcctggtaccaacagcacccaggcaaagcccccaaagtcgtgatttatgacgtcagtaagcggccctcaggggtccctgatcgcttctctggttccaagtctggcaacacggcctccctgaccgtctctgggctccaggctgaggatgaggctgattattactgcagctcatatgcaggcagcaacaatgcttgggtgttcggcggagggaccaagctgaccgtcctag

SEQ ID NO: 10647 - DNA, 322 bp, Homo sapiens
gacatccagatgacccagtctccatcctccctgtctgcatctgtaggagacagaatcaccatcacttgccaggcgagtcaggacattcgcaactttttaaattggtatcagcataaaccggggaaagcccctaacctcctgatctacgatgcatccaatttggggacaggggtcccatcaaggttcagtggaagtggatctgggacagattttactttcaccatcaacagcctgcagcctgaagatattgcaacatattactgtcaacagtatgataatctcccgatcaccttcggccaagggacacgactggaaattaaac

SEQ ID NO: 10648 - DNA, 325 bp, Homo sapiens
gacatccagatgacccagtctccatcctccctgtctgcatctgtaggagacagagtcaccatcacttgccaggcgagtcaggacattagcaactatgtaaattggtatcagcagaaaccagggaaagcccctaagctcctgatctacgatgcatccaatttggaaacaggggtcccatcaaggttcagtggaagtggatctgggacagattttactttcaccatcagcagcctgcagcctgaagatattgcaacatattactgtcaacagtatgataatctccctgcgatcaccttcggccaagggacacgactggagattaaac

SEQ ID NO: 10649 - DNA, 319 bp, Homo sapiens
gaaattgtgttgacacagtctccagccaccctgtctttgtctccaggggaaagagccaccctctcctgcagggccagtcagagtgttagcagctacttagcctggtaccaacagaaacctggccaggctcccaggctcctcatctatgatgcatccaacagggccactggcatcccagccaggttcagtggcagtgggtctgggacagacttcactctcaccatcagcagcctagagcctgaagattttgcagtttattattgtcagcagcgtagcaactggccctctttcggccctgggaccaaagtggatatcaaac

SEQ ID NO: 10650 - DNA, 334 bp, Homo sapiens
cagtctgtgctgacgcagccgccctcagtgtctggggccccagggcagagggtcaccatctcctgcactgggagcagctccaacatcggggcaggttatgatgtacactggtaccagcagcttccaggaacagcccccaaactcctcatctatggtaacagcaatcggccctcaggggtccctgaccgattctctggctccaagtctggcacctcagcctccctggccatcactgggctccaggctgaggatgaggctgattattactgccagtcctatgacagcagcctgagtgcttatgtcttcggaactgggaccaaggtcaccgtcctag

SEQ ID NO: 10651 - DNA, 319 bp, Homo sapiens
gacatccagatgacccagtctccatcctccctgtctgcatctgtaggagacagagtcaccatcacttgccgggcgagtcagggcattagcaattctttagcctggtatcagcagaaaccagggaaagcccctaagctcctgctctatgctgcatccacattggaaagtggggtcccatccaggttcagtggcagtggatctgggacggattacactctcaccatcagcagcctgcagcctgaagattttgcgacttattactgtcaacagtattatagtaccccgacgttcggccaagggaccaaggtggaaatcaaac

SEQ ID NO: 10652 - DNA, 335 bp, Homo sapiens
gatgttgtgatgacccagtctctactctccctgcccgtcacccttggacagccggcctccatctcctgcaggtctagtcgaagcctcgtatacagtgatggaaacacctacttgaattggtttcagcagaggccaggccaatctccaaggcgcctactttatagggtttctaaccgggactctggggtcccagacagattcagcggcagtgggtcaggcactgatttcacactgaaaatcagcagggtggaggctgaagatgttggggtttattactgcatgcaaggtacacactggccttacacttttggccaggggaccaagctggagatcaa

SEQ ID NO: 10653 - DNA, 328 bp, Homo sapiens
gaaatagtgatgatgcagtctccagccaccctgtctgtgtctccaggggaaagagccaccctctcctgcagggccagtcagagtgttagcagcaacttagcctggtaccagcagaaacctggccaggctcccaggctcctcatctatggtgcatccaccagggccactggcatcccagccaggttcagtggcagtgggtctgggacagagttcactctcaccatcagcagcctgcagtctgaagattttgcagtttattactgtcagcagtataataactggcctcctacgtggacgttcggccaagggaccaaggtggaaatcaaac

SEQ ID NO: 10654 - DNA, 328 bp, Homo sapiens
gacatccagatgacccagtctccatcttccgtgtctgcatctgtaggagacagagtcaccatcacttgtcgggcgagtcagggtattagcagctggttagcctggtatcagcagaaaccagggaaagcccctaaggtcctgatctatgctgcatccagtttgcaaagtggggtcccatcaaggttcagcggcagtggatctgggacagatttcactctcaccatcagcagcctgcagcctgaagattttgcaacttactattgtcaacaggctaacagtttccctcccacattcactttcggccctgggaccaaagtggatatcaaac

SEQ ID NO: 10655 - DNA, 322 bp, Homo sapiens; identical to SEQ ID NO: 4679

SEQ ID NO: 10656 - DNA, 331 bp, Homo sapiens
cagtctgccctgactcagcctgcctccgtgtctgggtctcctggacagtcgatcaccatctcctgcactggaaccagcagtgacgttggtggttataactatgtctcctggtacctacagcacccaggcaaagcccccaaactcattatttatgatgtccgtaatcggccctcaggggtttctaatcgcttctctggctccaagtctggcaacacggcctccctgaccatctctgggctccaggctgaggacgaggctgattattactgcagctcatatacaagcagcagcacttgggtgttcggcggagggaccaagctgaccgtcctag

SEQ ID NO: 10657 - DNA, 325 bp, Homo sapiens
tcctatgtgctgactcagccaccctcagtgtcagtggccccaggaaagacggccaggattacctgtgggggaaacaacattggaagtgaaagtgtgcactggtaccagcagaagccaggccaggcccctgtgctggtcatctattatgatagcgaccggccctcagggatccctgagcgagtctctggctccaactctgggaacacggccaccctgaccatcagcagggtcgaagccggggatgaggccgactattattgtcaggtgtgggatagcagtagtgatcattgggtgttcggcggagggaccaagctgaccgtcctag

SEQ ID NO: 10658 - DNA, 349 bp, Homo sapiens
tcctatgtgctgactcagccaccctcagtgtcagtggccccaggaaagacggccaggattacctgtgggggaaacaacattggaagtaaaagtgtgcactggtaccagcagaagccaggccaggcccctgtgctggtcatctattatcataacgaccggccctcagggatccctgagcggccctcagggatccctgagcgattctctggctccaactctgcgaacacggccaccctgaccatcagcagggtcgaagccggggatgaggccgactattactgtcaggtgtgggatagtagtagtgatcatcattgggtgttcggcggagggaccaagctgaccgtcctag

SEQ ID NO: 10659 - DNA, 337 bp, Homo sapiens
gatattgtgatgactcagtctccactctccctgcccgtcacccctggagagccggcctccatctcctgcaggtctagtcagagcctcctgcatagtaatggatacaactatttggattggtacctgcagaagccagggcagtctccacagctcctgatctatttgggttctaatcgggcctccggggtccctgacaggttcagtggcagtggatcaggcacagattttacactgaaaatcagcagagtggaggctgaggatgttggggtttattactgcatgcaagctctacaaactcctgggacttttggccaggggaccaagctggagatcaaac

SEQ ID NO: 10660 - DNA, 322 bp, Homo sapiens
gaaattgtgttgacgcagtctccaggcaccctgtctttgtctccaggggaaagagccaccctctcctgcagggccagtcagagtgttagcagcagctacttagcctggtaccagcagaaacctggccaggctcccaggctcctcatctatggtgcatccagcagggccactggcatcccagacaggttcagtggcagtgggtctgggacagacttcactctcaccatcagcagactggagcctgaagattttgcagtgtattactgtcagcagtatggtagcccgtggacgttcggccaagggaccaaggtggaaatcaaac

SEQ ID NO: 10661 - DNA, 328 bp, Homo sapiens
gaaattgtgttgacgcagtctccaggcaccctgtctttgtctccaggggaaagagccaccctctcctgcagggccagtcagagtgttagcagcagctacttagcctggtaccagcagaaacctggccaggctcccagactcctcatctatggtgcatccagcagggccactggcatcccagacaggatcagtggcagtgggtctgggacagacttcactctcaccatcagcagactggagcctgaagattttgcagtgtattactgtcagcactttggtagctcacctccgatcactttcggcggagggaccaaggtggagatcaaac

SEQ ID NO: 10662 - DNA, 322 bp, Homo sapiens
gacatccagatgacccagtctccttccaccctgtctgcatctgtaggagacagagtcaccatcacttgccgggccagtcagagtattagtagctggttggcctggtatcagcagaaaccagggaaagcccctaagctcctgatctataaggcgtctagtttagaaagtggggtcccatcaaggttcagcggcagtggatctgggacagaattcactctcaccatcagcagcctgcagcctgatgattttgcgacttattactgccaacagtataatagttattctcggacgttcggccaagggaccaaggtggaaatcaaac

SEQ ID NO: 10663 - DNA, 331 bp, Homo sapiens
gaaattgtgttgacgcagtctccaggcaccctgtctttgtctccaggggaaagagccaccctctcctgcagggccagtcagagtcttagcagcagctacttagcctggtaccagcaaaaacctggccaggctcccaggctcctcatctatggtgcatccagcagggccactggcatcccagacaggttcagtggcagtgggtctgggacagacttcactctcaccatcagcagactggagcctgaagattttgcagtgtattactgtcagcagtatggtagctcacctcagtccttcactttcggccctgggaccaaagtggatctcaaac

SEQ ID NO: 10664 - DNA, 322 bp, Homo sapiens
tcttctgagctgactcaggaccctgctgtgtctgtggccttgggacagacagtcaggatcacatgccaaggagacagcctcagaagctattatgcaagctggtaccagcagaagccaggacaggcccctgtacttgtcatctatggtaaaaacaaccggccctcagggatcccagaccgattctctggctccagctcaggaaacacagcttccttgaccatcactggggctcaggcggaagatgaggctgactattactgtaactcccgggacagcagtggtaaccatgtcttcggaactgggaccaaggtcaccgtcctag

SEQ ID NO: 10665 - DNA, 325 bp, Homo sapiens
gaaattgtgttgacgcagtctccaggcaccctgtctttgtctccaggggaaagagccaccctctcctgcagggccagtcagagtgttagcagcaactacttagcctggtaccagcagaaacctggccaggctcccaggctcctcatccatggtgcatccagcagggccgctggcatcccagacaggttcagtggcagtgggtctgggacagacttcactctcaccatctacagactggagcctgaagattttgcagtgtattactgtcagcagtatggtagctcaccgtggacgttcggccaagggaccaaggtggagatcaaac

SEQ ID NO: 10666 - DNA, 328 bp, Homo sapiens
gaaattgtgttgacacagtctccagccaccctgtctttgtctccaggggaaagagccaccctctcctgcagggccagtcagagtgttagcagctacttagcctggtaccaacagaaacctggccaggctcccaggctcctcatctatgatgcatccaacagggccactggcatcccagccaggttcagtggcagtgggtctgggacagacttcactctcaccatcagcagcctagagcctgaagattttgcagtttattactgtcagcagcgtagcaactggcctccagggctcactttcggcggagggaccaaggtggagatcaaac

SEQ ID NO: 10667 - DNA, 334 bp, Homo sapiens
aattttatgctgactcagccccactctgtgtcggagtctccggggaagacggtaaccatctcctgcacccgcagcagtggcagcattgccagcaactatgtgcagtggtaccagcagcgcccgggcagttcccccaccactgtgatctatgaggataaccaaagaccctctggggtccctgatcggttctctggctccatcgacagctcctccaactctgcctccctcaccatctctggactgaagactgaggacgaggctgactactactgtcagtcttatgatagcagcaatcattgggtgttcggcggagggaccaagctgaccgtcctag

SEQ ID NO: 10668 - DNA, 328 bp, Homo sapiens
gaaattgtgttgacacagtctccagccaccctgtctttgtctccaggggaaagagccaccctctcctgcagggccagtcagagtgttagcagctacttagcctggtaccaacagaaacctggccaggctcccaggctcctcatctatgatgcatccaacagggccactggcatcccagccaggttcagtggcagtgggtctgggacagacttcactctcaccatcagcagcctagagcctgaagattttgcagtttattactgtcagcagcgtagcaactggcctccgggattcactttcggccctgggaccaaagtggatatcaaac

SEQ ID NO: 10669 - DNA, 331 bp, Homo sapiens
cagtctgccctgactcagcctcgctcagtgtccgggtctcctggacagtcagtcaccatctcctgcattggaaccaacagtgatgttggtgctcataactttgtctcctggtaccgacacctcccaggcaaagcccccaaactcataatttatgatgtcagtcagcggccctcaggggtccctgctcgcttctctggctccaagtctggcaacacggcctccctgaccatctctggggtccaggctgaggatgaggctgattattactgctgctcatatggaggaggttattttttgatattcggtggagggaccaagctgaccgtcctag

SEQ ID NO: 10670 - DNA, 322 bp, Homo sapiens
gaaattgtgttgacacagtctccagccaccctgtctttgtctccaggggaaagagccaccctctcctgcagggccagtcagagtgttagcagctacttagcctggtaccaacagaaacctggccaggctcccaggctcctcatctatgatgcatccaacagggccactggcatcccagccaggttcagtggcagtgggtctgggacagacttcactctcaccatcagcagcctagagcctgaagattttgcagtttattactgtcagcagcgtagcaactggaaggtcactttcggcggagggaccaaggtggagatcaaac

SEQ ID NO: 10671 - DNA, 325 bp, Homo sapiens
gacatccagatgacccagtctccatcctccctgtctgcatctgtaggagacagagtcaccatcacttgccaggcgagtcaagacattagcaactatttaaattggtatcagcaaaaaccagggaaagcccctaagctcctgatctacgatgcatccaatttggaaacaggggtcccatcaaggttcagtggaagtggatctgggacagattttactttcaccatcagcagcctgcagcctgaagatattgcaacatattactgtcaacgatatgataatctcccctcgagcacttttggccaggggaccaagctggagatcaaac

SEQ ID NO: 10672 - DNA, 331 bp, Homo sapiens
gatattgtgatgactcagtctccactctccctgcccgtcacccctggagagccggcctccatctcctgcaggtctagtcagagcctcctgcatagtaatggatacaactatttggattggtacctgcagaagccagggcagtctccacagctcctgatctatttgggttctaatcgggcctccggggtccctgacaggttcagtggcagtggatcaggcacagattttacactgaaaatcagcagagtggaggctgaggatgttggggtttattactgcatgcaagctctacaaacttctttcggcggagggaccaaggtggagatcaaac

SEQ ID NO: 10673 - DNA, 322 bp, Homo sapiens
gacatccggttgacccagtctccatccttcctgtctgcatctctgggagacagagtcaccatcacttgccgggccagtcagggcattagcagttatttaggttggtatcagcacaaaccagggaaagcccctaacctcctgatctttgctgcatccactttgcaaagtggggtcccatcaaggttcagcggcagtggatctgggacagaattcactctcacaatcagcagcctgcagcctgaagattttgcaacttattactgtcaacaacttcatagttacccgctcactttcggcggagggaccaaggtggagatcaaac

SEQ ID NO: 10674 - DNA, 325 bp, Homo sapiens
gacatccagatgacccagtctccatcctccctgtctgcatctgtaggagacagagtcaccatcacttgccaggcgagtcaggacattagcaactatttaaattggtatcagcagaaaccagggaaagcccctgagctcctgatctacgatgcatccgatttggaaacaggggtcccatcaaggttcagtggaagtggatctgggacagattttactttcaccatcagcagcctgcagcctgaagatattgcaacatattactgtcaacagtatgataatctccctccgatcactttcggccctgggaccaaagtggatatcaaac

SEQ ID NO: 10675 - DNA, 325 bp, Homo sapiens
gaaattgtgttgacgcagtctccaggcaccctgtctttgtctccaggggaaagagccaccctctcctgcagggccagtcagagtgtaagtagcagctacttagcctggtaccagcagaaacctggccaggctcccaggctcctcatctatggtgcattcagcagggccactggcatcccagacaggttcagtggcagtgggtctgggacagacttcactctcaccatcagcagactggagcctgaagattttgcagtgtattactgtcagcagtatggtaactcaccgtggacgttcggccaagggaccaaggtggaaatcaaac

SEQ ID NO: 10676 - DNA, 322 bp, Homo sapiens
gacatccagatgacccagtctccatcctccctgtctgcatctgtaggagacagagtcaccatcacttgccgggcaagtcagagcattagcagctatttaaattggtatcagcagaaaccagggaaagcccctaagctcctgatctatgctgcatccagtttgcaaagtggggtcccatcaaggttcagtggcagtggatctgggacagatttcactctcaccatcagcagtctgcaacctgaagattttgcaacttactactgtcaacagagttacagtacctcgtggacgttcggccaagggaccaaggtggaaatcaaac

SEQ ID NO: 10677 - DNA, 322 bp, Homo sapiens; identical to SEQ ID NO: 808

SEQ ID NO: 10678 - DNA, 325 bp, Homo sapiens
tcctatgtgctgactcagccaccctcggtgtcagtggccccaggaaagacggccaggataacctgtgggggaaacaacattggaagtgaaagtgtgcactggtaccagcagaagccaggccaggcccctgtgctggtcgtctatgatgataccgaccggccctcagggatccctgagcgattctctggctccagctctgggaacacggccaccctggccatcagcagggtcgaagccggggatgaggccgactattactgtcaggtgtgggatagtagcagtgatctcgtggtattcggcggagggaccaagctgaccgtcctag

SEQ ID NO: 10679 - DNA, 325 bp, Homo sapiens
gacatccagttgacccagtctccatccttcctgtctgcatctgtaggagacagagtcaccatcacttgccgggccagtcagggcattagcagttatttagcctggtatcagcaaaaaccggggaaagcccctaagctcctgatctatgctacatccactttgcaaagtggggtcccatcaaggttcagcggcagtggatctgggacagaattcactctcacaatcagcagcctgcagcctgaagattttgcaacttattactgtcaacagcttaatacttacctcccgatcaccttcggccatgggacacgactggagattaaac

SEQ ID NO: 10680 - DNA, 325 bp, Homo sapiens
gaaattgtgttgacgcagtctccaggcaccctgtctttgtctccaggggaaagagccaccctctcctgcagggccagtcacagtgttagcagcagctacttagcctggtaccagaagaaacctggccaggctcccaggctcctcatctatggtgcatccatcagggccactggcatcccagacaggttcagtggcagtgggtctgggacagacttcactctcaccatcagcagactggagcctgaagattttgcagtgtatttctgtcagcagtatggtagctcacgggggacgttcggccaagggaccaaggtggaaatcaaac

SEQ ID NO: 10681 - DNA, 328 bp, Homo sapiens
caggctgtggtgactcaggagccctcactgactgtgtccccaggagggacagtcactctcacctgtggctccagcactggagctgtcaccagtggtcattatccctactggttccagcagaagcctggccaagcccccaggacactgatttatgatacaagcaacaaacactcctggacccctgcccggttctcaggctccctccttgggggcaaagctgccctgaccctttcgggtgcgcagcctgaggatgaggctgagtattactgcttgctctcctatagtgatacttgggtgttcggcggagggaccaagctgaccgtcctag

SEQ ID NO: 10682 - DNA, 322 bp, Homo sapiens; identical to SEQ ID NO: 2296

SEQ ID NO: 10683 - DNA, 325 bp, Homo sapiens
gacatccagatgacccagtctccatcttccgtgtctgcatctgtaggagacagagtcaccatcacttgtcgggcgagtcagggtattagcagctggttagcctggtatcagcagaaaccagggaaagcccctaagctcctgatctatgctgcatccagtttgcaaagtggggtcccatcaaggttcagcggcagtggatctgggacagatttcactctcaccatcagcagcctgcagcctgaagattttgcaacttactattgtcaacaggctaacagtttccccgcgctcactttcggcggagggaccaaggtggagatcaaac

SEQ ID NO: 10684 - DNA, 322 bp, Homo sapiens
gacatccagttgacccagtctccatccttcctgtctgcatctgtaggagacagagtcgccatcacttgccgggccagtcagggcattagcagttatttagcctggtatcagcaaaaaccagggaaagcccctaagctcctgatctatgctgcatccactttgcaaagtggggtcccatcaaggttcagcggcagtggatctgggacagaattcactctcacaatcagcagcctgcagcctgaagattttgcaacttattactgtcaacagcttaatacttacccgtggacgttcggccaagggaccaaggtggaaatcaaac

SEQ ID NO: 10685 - DNA, 322 bp, Homo sapiens
gacatccagatgacccagtctccatcctccctgtctgcatctgtaggagacagagtcaccatcacttgccaggcgagtcaggacattagcacctatttaaattggtatcagcagaaaccagggaaagcccctaaactcctgatctacgatgcatccaatttggaaacaggggtcccatcaaggttcagtggaagtggatctgggacagattttgctttcaccatcagcagcctgcagcctgaagatattgcaacatattactgtcaacagtatgataatctcccattcaccttcggccctgggaccaaagtggatctcaaac

SEQ ID NO: 10686 - DNA, 322 bp, Homo sapiens
gacatccagatgacccagtctccatcctccctgtctgcatctgtaggagacagagtcaccatcgcttgccgggcaagtcaggccattagaaatgatttaggctggtttcagcagaaaccagggaaagcccctaagcgcctgatctatgctgcatccagtttgcaaagtggggtcccatcaaggttcagcggcagtggatctgggacagaattcactctcacaatcagcagcctgcagcctgaagattttgcaacttattactgtctacagcattatagttacccgctcactttcggcggagggaccaaggtggagatcaaac

SEQ ID NO: 10687 - DNA, 340 bp, Homo sapiens
gacatcgtgatgacccagtctccagactccctggctgtgtttctgggcgagagggccaccatcaactgcaagtccagccagagtgttttatacagctccaacaataagaactacttagcttggtaccagcagaagccaggacagcctcctaagctgctcatttactgggcatctacccgggaatccggggtccctgaccgattcagtggcagcgggtctgggacagatttcactctcaccatcagcagcctgcaggctgaagatgtggcagtttattactgtcagcaatattataatactccgtacacttttggccaggggaccaagctggagatcaaac

SEQ ID NO: 10688 - DNA, 328 bp, Homo sapiens
cagtctgtgttgacgcagccgccctcagtgtctgcggccccaggacagaaggtcaccatctcctgctctggaagcagctccaacattgggaataattatgtatcctggtaccagcagctcccaggaacagcccccaaactcctcatctatgaaaataataagcgaccctcagggattcctgaccgattctctggctccaagtctggcacgtcagccaccctgggcatcaccggactccagactggggacgaggccgattattactgcggaacatgggatagcagcctgagtgctgtgttcggcggagggaccaagctgaccgtcctag

SEQ ID NO: 10689 - DNA, 334 bp, Homo sapiens
caatctgtgctgacgcagccgccctcagtgtctggggccccagggcagagggtcaccatctcctgcactgggagcagctccaacatcgggggaggttttgatgtacactggtaccagcagcttccaggaatagcccccaaactcctcatctatgctaacaacattcggccctcaggcgtccctgaccgattctctggctccaagtctggcacctcagcctccctggccatcactgggctccaggctgaggatgaggctgattattactgccagtcccatgacagaaggcagagtgatgtagtattcggcggagggaccaagctgaccgtcctag

SEQ ID NO: 10690 - DNA, 328 bp, Homo sapiens
gaaattgtgttgacacagtctccagccaccctgtctttgtctccaggggaaagagccaccctctcctgcagggccagtcagagtgttagcagctacttagcctggtaccaacagaaacctggccaggctcccaggctcctcatctatgatgcatccaacagggccactggcatcccagccaggttcagtggcagtgggtctgggacagacttcactctcaccatcagcagcctagagcctgaagattttgcagtttattactgtcagcagcgtagcaactggcctccggagtacacttttggccaggggaccaagctggagatcaaac

SEQ ID NO: 10691 - DNA, 310 bp, Homo sapiens
gaaatagtgatgacgcagtctccagccaccctgtctgtgtctccaggggaaagagccaccctctcctgcagggccagtcagagtgttagcagcaacttagcctggtaccagcagaaacctggccaggctcccaggctcctcatctatggtgcatccaccagggccactggtatcccagccaggttcagtggcagtgggtctgggacagagttcactctcaccatcagcagcctgcagtctgaagattttgcagtttattactgtcagcagtctgaaactttcggccctgggaccaaagtggatatcaaac

SEQ ID NO: 10692 - DNA, 322 bp, Homo sapiens
gacatccagatgacccagtctccatcttctgtgtctgcatctgtaggagacagagtcaccatcacttgtcgggcgagtcagggtattagcagctggttagcctggtatcagcagaaaccagggaaagcccctaagctcctgatctatgctgcatccagtttgcaaagtggggtcccatcaaggttcagcggcagtggatctgggacagatttcactctcactatcagcagcctgcagcctgaagattttgcaacttactattgtcaacaggctaacagtttcccgatcaccttcggccaagggacacgactggagattaaac

SEQ ID NO: 10693 - DNA, 322 bp, Homo sapiens
gacatccagatgacccagtctccttccaccctgtctgcatctgtaggagacagagtcaccatcacttgccgggccagtcagagtattagtagctggttggcctggtatcagcagaaaccagggaaagcccctaagctcctgatctataaggcatctagtttagaaagtggggtcccatcaaggttcagcggcagtggatctgggacagaattcactctcaccatcagcagcctgcagcctgatgattttgcaacttattactgccaacagtataatagttattcgtggacgttcggccaagggaccaaggtggaaatcaaac

SEQ ID NO: 10694 - DNA, 340 bp, Homo sapiens
gatattgtgatgacccagactccactctccctgcccgtcacccctggagagccggcctccatctcctgcaggtctagtcagagcctcttggatagtgatgatggaagcacctatttggactggtacctgcagaagccagggcagtctccacaactcctgatctatacgctttcctatcgggcctctggagtcccagacaggttcagtggctatgggtcaggcactgatttcacactgaagatcagcagggtggaggctgaggatgttggagtttattactgcatgcaacgcatagagtttccttggacgttcggccaagggaccaaggtggaaatcaaac

SEQ ID NO: 10695 - DNA, 331 bp, Homo sapiens
cagtctgccctgactcagcctgcctccgtgtctgggtctcctggacagtcgatcaccatctcctgcactggaaccagcagtgacgttggtggttataactatgtctcctggtaccaacagcacccaggcaaagcccccaaactcatgattcatgatgtcagtaatcggccctcaggggtttctaatcgcttctccggctccaagtctggcaacacggcctccctgaccatctctgggctccaggctgaggacgaggctgactattactgcagctcatatacaagcagtagcacttatgtcttcggaactgggaccaaggtcaccgtcctag

SEQ ID NO: 10696 - DNA, 322 bp, Homo sapiens
gacatccagatgacccagtctccatcctccctgtctgcatctgtaggggacagagttaccatcacttgccgggcaagtcagagcattagcagctatttaaattggtatcagcagaaaccagggaaagcccctaaggtcttcatctatggtgcatccagtttgcaaagtggggtcccgtcaaggttcagtggcagtggatctgggacagatttcactctcaccatcagcagtctgcaacctgaagattttgcaacttactactgtcaacagagttacagtatccctcggacttttggccaggggaccaagctggagatcaaac

SEQ ID NO: 10697 - DNA, 322 bp, Homo sapiens
gacatccagatgacccagtctccatcttccctgtctgcatctgtaggagacagagtcaccatcacttgccgggcaagtcagggcattagaaatgatttaggctggtatcagcagaaaccagggaaagcccctaagcgcctgatctatgctgcatccagtttgcaaagtggggtcccatcaaggttcagcggcagtggatctgggacagaattcactctcacaatcagcagcctgcagcctgaagattttgcaacttattactgtctacagcattatagttacccgctcactttcggcggagggactaaggtggagatcaaac

SEQ ID NO: 10698 - DNA, 331 bp, Homo sapiens
cagtctgccctgactcagcctgcctccgtgtctgggtctcctggacagtcgatcaccatctcctgcactggaaccagcagtgacgttggtggttataactatgtctcctggtaccaacagcacccaggcaaagcccccaaactcatgatttatgatgtcagtaatcggccctcaggggtttctaatcgcttctctggctccaagtctggcaacacggcctccctgaccatctctgggctccaggctgaggacgaggctgattattactgcagctcatatacaagcagcagcactctcgagttcggcggagggaccaagctgaccgtcctag

SEQ ID NO: 10699 - DNA, 322 bp, Homo sapiens; identical to SEQ ID NO: 851

SEQ ID NO: 10700 - DNA, 328 bp, Homo sapiens
gaaatagtgatgacgcagtctccagccaccctgtctgtgtctccaggggaaagagtcaccctctcctgcaggaccagtcagagtgttagcagcaacttagcctggtaccagcagaaacctggccaggctcccaggctcctcatctatggtgcatccaccagggccactggtatcccagccaggttcagtggcagtgggtctgggacagagttcactctcaccatcagcagcctgcagtctgaagattttgcagtttattactgtcagcagtatgatgactggcctcctacgtggacgttcggccaagggaccaaggtggaaatcaaac

SEQ ID NO: 10701 - DNA, 322 bp, Homo sapiens; identical to SEQ ID NO: 837

SEQ ID NO: 10702 - DNA, 322 bp, Homo sapiens
gacatccagatgacccagtctccatcctccctgtctgcatctgtaggagacagagtcaccatcacttgccgggcaagtcagaacattagcgtctatttaaattggtatctgcagaaacccgggaaagcccctaagctcctgatctatgctgcgtccagtttgcaaagtggggtcccatcaaggttcagtggcactggatctgggacagatttcactctcaccatcagcagtctgcaacctgaagattttgcaacttactactgtcaacagagttacactaccccgtggacgttcggccaagggaccaaggtggaaatcaaac

SEQ ID NO: 10703 - DNA, 322 bp, Homo sapiens
gacatccagttgacccagtctccatcctccctgtctgcatctgtaggagacagagtcaccatcacttgccgggtgagtcagggcattagcagttatttaaattggtatcggcagaaaccagggaaagttcctaagctcctgatctatagtgcatccaatttgcaatctggagtcccatctcggttcagtggcagtggatctgggacagatttcactctcaccatcagcagcctgcagcctgaagattttgcaacttactattgtcaacaggctaacagtttccccctcactttcggcggagggaccaaggtggagatcaaac

SEQ ID NO: 10704 - DNA, 325 bp, Homo sapiens
gacatccagctgacccagtctccatcctccctgtctgcatctgtaggagacagagtcaccatcacttgccgggcaagtcagagcattagcagctatttaaattggtatcagcagaaaccagggaaagcccctaagctcctgatctatgctgcatccagtttgcaaagtggggtcccctcaaggttcagtggcagtggatctgcgacagatttcactctcaccatcagcagtctgcaacctgaagattttgcaacttactactgtcaacagagttacagtaccctcggtagaacttttggccaggggaccaagctggagatcaaac

SEQ ID NO: 10705 - DNA, 322 bp, Homo sapiens; identical to SEQ ID NO: 4539

SEQ ID NO: 10706 - DNA, 334 bp, Homo sapiens
aatttgatgctgactcagccccactctgtatcggagtctccggggaagacggtaaccatctcctgcacccgcagcaggggcagcattgccagcaactatgtgcagtggtaccagcagcgcccgggcagttcccccaccactgtgatctatgaggataaccaaagaccctctggggtccctgatcggttctctggctccatcgacagctcctccaactcagcctccctcatcatctctggactgaagactgaggacgaggctgactactactgtcagtcttatggtggcagcgatgattgggtgttcggcggagggaccaaactgaccgtcctag

SEQ ID NO: 10707 - DNA, 322 bp, Homo sapiens
gacatccagatgacccagtctccttccaccctgtctgcatctgtaggagacagggtcgccatcacttgccgggccagtcagagtattagtagctggttggcctggtatcagcagaaaccagggaaagcccctaacctcctgatctataaggcatctactttagaaagtggggtcccatcaaggttcagcggcagtggatctgggacagaattcactctcaccatcagcagcctgcagcctgatgattttgcaacttattactgccaacactataatagtttttctcagacgttcggccaagggaccaaggtggagatcaaac

SEQ ID NO: 10708 - DNA, 340 bp, Homo sapiens
gatgttgtgatgactcagtctccactctccctgcccgtcacccttggacagccggcctccatctcctgcaggtctagtcaaagcctcgtatacagtgatggaaacaccttcttgagttggtttcagcagaggccaggccaacctccaaggcgcctaatttataaggtttctaaccgggactctggggtcccagacagattcagcggcagtgggtcaggcactgatttcacattgaaaatcagcagggtggaggctgaggatgttggggtttattactgcatgcaaggtacacattggcctccgaggacgttcggccaagggaccaaggtggaaatcaaac

SEQ ID NO: 10709 - DNA, 329 bp, Homo sapiens
cagtctgtgttgacgcagccgccctcagtttctgcggccccgggacagacggtcaccatctcctgctctggaagcagctccaacattggtaatgactatttatcctggtaccagcacctcccaggaacagcccccagactcctcatttatgatacttataagagaccctcagggattcctgaccgattctctggctccaagtctggcacgtcagccaccctggccatcaccgagctccagactggggacgaggccgattattactgcggaacatgggataccagcctgggtgcaggggtgttcggcggagggaccaagctgaccgtcct

SEQ ID NO: 10710 - DNA, 331 bp, Homo sapiens
cagtctgtattgacgcagccgccctcagtatctgcggccccgggacagacggtcaccatctcctgctctggaagcacctccaacattggaaatgactatctatcgtggtaccaacacctcccaggtagagcccccagactcctcatttatgacaattctaggcgacccgcagcgactcctgaccgattctctggctccaagtctgccacgtcagccaccctggtcatcaccgacctccagactggggacgagggcgattactactgcggaacatgggataccagtctgagtgcaggggtcttcggcggagggacaaaggtgaccgtcctag

SEQ ID NO: 10711 - DNA, 328 bp, Homo sapiens
cagtctgccctgactcagcctcgctcagtgtccgggtctcctggacagtcagtcaccatctcctgcactggaaccagcagtgatgttggtggttattactatgtctcctggtaccaacagcacccaggcaaagcccccaaactcatgatttatgatgtcagtaagcggccctcaggggtccctgatcgcttctctggctccaagtctggcaacacggcctccctgaccatctctgggctcaaggctgaggatgaggctgattattactgctgctcatatgcagtcggctaccctgtattcggcggagggaccaagctgaccgtcctag

SEQ ID NO: 10712 - DNA, 322 bp, Homo sapiens
gaaatagtcatgacgcagtctccagccaccctgtctgtgtctccaggggaaagagtcaccctctcctgcagggccagtcagagtgttagcagcaacttagcctggtaccagcagaaacctggccaggctcccaggctcctcatctatggtgcatccaccagggccactggtatcccagccaggttcagtggcagtgggtctgggacagagttcactctcgccatcagcagcctgcagtctgaagattttgcagtttattactgtcagcagtatgataactggcctcgcactttcggccctgggaccaaagtggatatcaaac

SEQ ID NO: 10713 - DNA, 325 bp, Homo sapiens; identical to SEQ ID NO: 10425

SEQ ID NO: 10714 - DNA, 325 bp, Homo sapiens
gaaattgtgttgacgcagtctccaggcaccctgtctttgtctccaggggaaagagccaccctctcctgcagggccagtcagagtgttagcagcagtttcttagcctggtaccagcagaaacctgaccagactcccaggctcctcatctatggtgcatccagcagggccactggcatcccagacaggttcagtggcagtgggtctgggacagacttcattctcaccatcagcagactggagcctgaagattttgcagtgtattactgtcagcagtatggtagctcaccgtggacgttcggccaagggaccaaggtggaaatcaaac

SEQ ID NO: 10715 - DNA, 331 bp, Homo sapiens
cagtctgccctgactcagcctgcctccgtgtctgggtctcctggacagtcgatcaccatctcctgcactggaaccagcagtgacgttggtggttataactttgtctcctggtaccaacaacacccaggcaaacctcccaaactcatgatttatgatgtcagtaatcggccctcaggggtttctaatcgcttctctggctccaagtctggcaacacggcctccctgaccatctctgggctccagcctgaggacgaggctgattattactgcagctcatttacaagcatcagcactgtggtattcggcggagggaccaagctgctcgtcctag

SEQ ID NO: 10716 - DNA, 331 bp, Homo sapiens; identical to SEQ ID NO: 9439

SEQ ID NO: 10717 - DNA, 331 bp, Homo sapiens
cagtctgccctgactcagcctccctccgcgtccgggtctcctggacagtcagtcaccatctcctgcactggaaccagcagtgacgttggtggttatggttatgtctcctggtaccaacaacacccaggcaaagcccccaaactcatcatttatgaggtcagtaagcggccctcaggggtccctgatcgcttctctggctccaagtctggcaacacggcctccctgaccgtctctgggctccaggctgaggatgaggctgattattactgcagctcagatgcaggcatcaacaatttgctattcggcggagggaccaaggtgaccgtcctag

SEQ ID NO: 10718 - DNA, 325 bp, Homo sapiens
gaaattgtgttgacgcagtctccaggcaccctgtctttgtctccaggggaaagagccaccctctcctgcagggccagtcagagtgttagcagcagctacttagcctggtaccagcagaaacctggccaggctcccaggctcctcatctatggtgcatccaacagggccactggcatcccagacaggttcagtggcagtgggtctgggacagacttcattctcaccatcagcagactggagcctgaagattttgcagtgtattactgtcagcagtatggtagctcacattggacgttcggccaagggaccaaggtggaaatcaaac

SEQ ID NO: 10719 - DNA, 328 bp, Homo sapiens
gaaattgtgttgacacagtctccagccaccctgtctttgtctccaggggaaagagccaccctctcctgcagggccagtcagagtgttagcagctacttagcctggtaccaacagaaacctggccaggctcccaggctcctcatctatgatgcatccaacagggccactggcatcccagccaggttcagtggcagtgggtctgggacagacttcactctcaccatcagcagcctagagcctgaagattttgcagtttattactgtcagcagcgtagcaactggcctccgttattcactttcggccctgggaccaaagtggatatcaaac

SEQ ID NO: 10720 - DNA, 319 bp, Homo sapiens
tcctttgaactgactcagccaccctcagtgtccgtgtccccaggacagacagccagcatcgcctgctctggggatagattgggggataagtatgtttgctggtatcagctgaagtcaggccagtcccctgtgctggtcatctatcaggataccaagcggccctcagggatccctgagcgattctctggctccttctctgggaacacagccactctgaccatcagcgggacccagtctatggatgaggctgactattactgtcagtcgtgggacaccaacactgcgatattcggcggagggaccagactgaccgtcctag

SEQ ID NO: 10721 - DNA, 322 bp, Homo sapiens
gacatccagatgacccagtctccatcctccctgtctgcatctgtaggagacagagtcaccatcacttgccgggcaagtcagagcattagcagctatttaaattggtatcagcagcgaccagggaaagcccctaagctcctgatctatgctgtatccactttgcaaagtggggtcccatcaaggttcagtggcagtggatctgggacagatttcactctcaccatcagcagtctgcaacctgaagactctgcaacttactactgtcaacagacttacagtacccagatcactttcggccctgggaccaaagtggatatcaaac

SEQ ID NO: 10722 - DNA, 331 bp, Homo sapiens; identical to SEQ ID NO: 10368

SEQ ID NO: 10723 - DNA, 334 bp, Homo sapiens
cagtctgtgctgacgcagccgccctcagtgtctggggccccagggcagagggtcaccatctcctgcactgggagcagctccaacatcggggcaggttatgatgtacactggtaccagcagcttccaggaacagcccccaaactcctcatctatgttaacaccaatcggccctcaggggtccctgaccgattctctggctccaagtctgacacctcagcctccctggccatcactgggctccaggctgaggatgaggctgattattactgccagtcctatgacagcagcctgagtgattcagtcttcggcggagggaccaagctgaccgtcctag

SEQ ID NO: 10724 - DNA, 340 bp, Homo sapiens
gacatcgtgatgacccagtctccagactccctggctgtgtctctgggcgagagggccaccatcaactgcaagtccggccagagtgttttatccagctccagcaataagaactacttagcttggtaccagcagaaaccaggacagcctcctaagctgctcatttactgggcatctacccgggaatccggggtccctgaccgattcagtggcagcgggtctgggacagatttcactctcaccatcagcagcctgcaggctgaagatgtggctgtttactactgtcagcaatattatagtattctttggacgttcggccaagggaccagggtggaaatcaaac

SEQ ID NO: 10725 - DNA, 322 bp, Homo sapiens
gaaattgtgttgacacagtctccagccaccctgtctttgtctccaggggaaagagccaccctctcctgcagggccagtcagagtgttagcagctacttagcctggtaccaacagaaacctggccaggctcccaggctcctcatctatgatgcatccaacagggccactggcatcccagccaggttcagtggcagtgggtctgggacagacttcactctcaccatcagcagactggagcctgaagattttgcagtgtattactgtcagcagtatggtagctcaccgtggacgttcggccaagggaccaaggtggaaatcaaac

SEQ ID NO: 10726 - DNA, 325 bp, Homo sapiens
gaaattgtgttgacacagaccccagccaccgtgtctttgtctccaggggaaagagccaccctctcctgcagggccagtcagagtgttagcagcagctacttagcctggtaccagcagaaacctggccaggctcccaggctcctcatctatggtgcatccagcagggccactggcatcccagacaggttcagtggcagtgggtctgggacagacttcactctcaccatcagcagactggagcctgaagattttgcagtgtattactgtcagcagtatggtagctcaccgtggacgttcggccaagggaccaaggtggaaatcaaac

SEQ ID NO: 10727 - DNA, 322 bp, Homo sapiens
gaaatagtgatgacgcagtctccagccaccctgtctgtgtctccaggggaaagagccaccctctcctgcagggccagtcagagtgttagcagcaacttagcctggtaccagcagaaagctggccaggctcccaggctcctcatctatggtgcatccaccagggccactgggatcccagccaggttcagtggcagtgggtctgggacagagttcactctcaccatcagcagcctgcagtctgaagattttgcagtttattattgtcagcagtataataactggcctccgtacacttttggccaggggaccaagctggagatca

SEQ ID NO: 10728 - DNA, 321 bp, Homo sapiens
gacatccagatgacccagtctccatcttccgtgtctgcatctgtaggggacagagtcaccatcacttgtcgggcgagtcagcgtattatcagttggttagcctggtatcagcagaaaccagggaaagcccctaagctcctgatctatgctgcatccagtttgcaaagtggggtcccatcaaggttcagcggcagtggatctgggacagatttcactctcagcatcagcagcctgcagcctgatgattttgcaacttactattgtcaacaggctaacaatttcccgatcaccttcggccaagggacacgactggagattaaa

SEQ ID NO: 10729 - DNA, 325 bp, Homo sapiens
gacatccagatgacccactctccatcctccctgtctgcatctgtaggagacagagtcaccatcacttgccgggcgagtcagagcattagcagctttttaaattggtatcagcagaaaccagggaaagcccctaagctcctgatctatgctgcattcagattgcaaagtggggtcccatcaaggttcagtggcagtggatctgggacagatttcactctcaccatcagcagtctgcaacctgaagattttgcaacttactcctgtcaacagagttacagtgcccctccgtggacgttcggccaagggaccaaggtggaaatcaaac

SEQ ID NO: 10730 - DNA, 325 bp, Homo sapiens
gaaattgtgttgacgcagtctccaggcaccctgtctttgtctccaggggaaagagccaccctctcctgcagggccagtcagagtgttagcggcagctacttagcctggtaccaacagaaacctggccaggctcccaggctcctcatctatggtgcatccagcagggccactggcatcccagacaggttcagtggcagtgggtctgggacagacttcactctcaccatcaacagactggagcctgaagattttgcagtgtattactgtcagcaatatggtagctcaccattcactttcggccctgggaccaaagtggatatcaaac

SEQ ID NO: 10731 - DNA, 296 bp, Homo sapiens
cagtctgccctgactcagcctgcctccgtgtctgggtctcctggacagtcgatcaccatctcctgcactggatccagcagtgatgttgggagttgtaaccttgtctcctgcttccaacaacaccccggcaaagcccccaaactcatgatttatgatgactccaagtctggcaacacggcctccctgacaatctctgggctccaggctgaggacgaggctgattattactgccactcatatgcaggtagtagccccttaatgtgtgttcggcagtggcaccaaggtgaccgtcctcg

SEQ ID NO: 10732 - DNA, 319 bp, Homo sapiens
gacatccagatgacccagtctccatcctccctgtctgcatctgtaggagacagagtcaccatcacttgccgggcaagtcagagcattagcatctatttaaattggtatcagcagaaaccagggaaagcccctaagctcctgatctatgctgcatccagtttgcaaagtggggtcccatcaaggttcagtggcagtggatccgggacagatttcactctcaccatcagcagtctgcaacctgaagattttgcaacttactactgtcaacagagttacactaccccggttttcggcggagggaccaaggtggagatcaaac

SEQ ID NO: 10733 - DNA, 340 bp, Homo sapiens
gacatcgtgatgacccagtctccagactccctggctgtgtctctgggcgagagggccaccatcaactgcaagtccagccagagtgttttacacagctccaacaataagaactacttaggttggtaccagcagaaaccaggacagactcctaagctgctcatttactgggcagctacccgggaatccggggtccctgaccgattcagtggcagcgggtctgggacagatttcactctcaccatcagcagcctgcaggccgaagatgtggcagtttattactgtcagcaatattatagtacgccgtacacttttggccaggggaccaaggtggagatcaaac

SEQ ID NO: 10734 - DNA, 322 bp, Homo sapiens
gacatccagatgacccagtctccatcctccctgtctgcatctgtaggagacagagtcaccatcacttgccgggcaagtcagagcattagcagctatttaaattggtttcagcagaaaccagggaaggcccctaagctcctgatctctgctgcatccagtttgcaaagtggggtcccatcaaggttcagtggcagtggatctgggacagatttcactctcaccatcagcagcctgcaggctgaagatgtggcagtttattactgtcagcaatattatagtactcctcgaacgttcggccaagggaccaaggtggaaatcaaac

SEQ ID NO: 10735 - DNA, 340 bp, Homo sapiens
gacatcgtgatgacccagtctccagactccctggctgtgtctctgggcgagagggccaccatcaactgcaagtccagccagaatgttttatacagctccaacaataagaactacttagcttggtaccagcagaaaccaggacagcctcctaagctgctcatttactgggcatctacccgggaatccggggtccctgaccgattcagtggcagcgggtctgggacagatttcactctcaccatcagcagcctgcaggctgaagatgtggcagtttattactgtcagcaatattatagtactcctcagactttcggcggagggaccaaggtggagatcaaac

SEQ ID NO: 10736 - DNA, 319 bp, Homo sapiens
gaaatagtgatgacgcagtctccagccaccctgtctgtgtctccaggggaaagagccaccctctcctgcagggccagtcagagtgttagcagcaacttagcctggtaccagcagaaacctggccaggctcccaggctcctcatctatggtgcatccaccagggccactggtatcccagtcaggttcagtggcagtgggtctgggacagagttcactctcaccatcagcagcctgcagtctgaagattttgcagtttatttctgtcagcagtataataactggccgacgttcggccaagggaccaaggtggaaatcaaac

SEQ ID NO: 10737 - DNA, 325 bp, Homo sapiens
gaaatagtgatgacgcagtctccagccaccctgtctgtgtctccaggggaaagagccaccctctcctgcagggccagtcagagtgttagcagcaacttagcctggtaccagcagaaacctggccaggctcccaggctcctcatctatggtgcatccaccagggccactggtatcccagccaggttcagtggcagtgggtctgggacagagttcactctcaccatcagcagcctgcagtctgaagattttgcagtttattactgtcagcagtataataactggctcgtattcactttcggccctgggaccaaagtggatatcaaac

SEQ ID NO: 10738 - DNA, 319 bp, Homo sapiens
tcctatgagttgactcagccaccctcagtgtccgtgtccccaggacagacagccagcatcacctgctctggaaataaattgggagataaatatgcttgctggtatcaacagaagccaggccagtcccctgtgctggtcatctatcaagataccaagcggccctcagggatccctgagcgattctctggctccaactctgggaacacagccactctgaccatcagcgggacccaggctatggatgaggctgactattactgtcaggcgtgggacagcagcactgtggtcttcggcggagggaccaagctgtccgtcctag

SEQ ID NO: 10739 - DNA, 136 bp, Homo sapiens
tggaagtggatctgggacagattttactttcaccatcagcagcctgcagcctgaagatattgcaacatattactgtcaacagtatgatggtctcccccgggcacttgtggccaggggaccaagctgcagatcaaac

SEQ ID NO: 10740 - DNA, 325 bp, Homo sapiens
tcctatgagctgacacagccaccctcggtgtcagtgtccccaggacagacggccaggatcacctgctctgcagatgctttgccaaaccaatatgcttattggtaccagcagaggccaggccaggcccctgtgctggtgatatataaagacagtgagaggcccacagggatccctgagcgattctctggctccagctcagggacaacagtcacgttgaccatcactggagtccaggcagaagacgaggctgactattattgtcaatcagcagacagcagtgctacttattgggtgttcggcggagggaccaagctgaccgtcctag

SEQ ID NO: 10741 - DNA, 343 bp, Homo sapiens
cagtctgtgctgacgcagccgccctcagtgtctggggccccagggcagagggtcaccatctcctgcactgggagcagctccaacatcggggcaggttatgatgtacactggtaccagcagcttccaggaacagcccccaaactcctcatctatggtaacagcaatcggccctcaggggtccctgaccgattctctggctccaagtctggcacctcagcctccctggccatcactgggctccaggctgaggatgaggctgattattactgccagtcctatgacagcagcctgagtggttcgggtcatgtggtattcggcggagggaccaagttgaccgtcctag

SEQ ID NO: 10742 - DNA, 337 bp, Homo sapiens
cagtctgccctgactcagcctgcctccgtgtctgggtctcctggacagtcgatcaccatctcctgcactggaaccagcagtgacgttggtggttataactgtgtctcctggtaccaacatcacccaggcaaagcccccaaactcatgatttatgatgtcaataatcggccctcaggggtttctaatcgcttctctggctccaagtctggcaacacggcctccctgaccatctctgggctccaggctgaggacgaggctgattattactgcagctcatatacaagcagcagcactcttaattgggtgttcggcggagggaccaagctgaccgtcctag

SEQ ID NO: 10743 - DNA, 322 bp, Homo sapiens
gacatccagatgacccagtctccttccaccctgtctgcatctgtaggagacagagtcaccatcacttgccgggccagtcagagtattagtagctggttggcctggtatcagcagaaaccagggaaagcccctaagctcctgatctataaggcgtctagtttagaaagtggggtcccatcaaggttcagcggcagtggatctgggacagaattcactctcaccatcagcagcctgcagcctgatgattttgcaacttattactgccaacagtataatagttattctccgtcttttggccaggggaccaagctggagatcaaac

SEQ ID NO: 10744 - DNA, 325 bp, Homo sapiens
tcctatgagctgacacagccaccctcggtgtcagtgtccccaggacagacggccaggatcacctgctctgcagatgcattgccaaagcaatatgcttattggtaccagcagaagccaggccaggcccctgtgctggtgatatataaagacagtgagaggccctcagggatccctgagcgattctctggctccagctcagggacaacagtcacgttgaccatcagtggagtccaggcagaagacgaggctgactattactgtcaatcagcagacagcagtactacttatctggtattcggcggagggaccaagctgaccgtcctag

SEQ ID NO: 10745 - DNA, 325 bp, Homo sapiens
gacatccagatgacccagtctccatcctccctttctacatctgtaggagacagagtcaccatcacttgccgggcaagtcagaccattagcaggtatttaaattggtatcagcagaaaccagggaaagcccctaagctcctaatctatgctgcatccagtctgcaaagtggggtcccatcaaggttcagtggcagtggatctgggacagatttcaacctcaccatcagcagtctgcaacctgaagattttgcaacttactactgtcaacagagttacaggacccctctggtcaccttcggccaagggacacgactggagattaaac

SEQ ID NO: 10746 - DNA, 325 bp, Homo sapiens
gaaattgtgttgacgcagtctccaggcaccctgtctttgtctccaggggaaagagccaccctctcctgtagggccagtcagagtgttagcagtaactacttagcctggtaccaacagaaacctggccaggctcccaggctcctcatctatggtgcatccagcagggccactggcatcccagacaggttcagtggcagtgggtctgggacagacttcactctcaccatcagcagactggagcctgaagattttgcagtgtattactgtcagcagtatgctagctcacccttggcgttcggccaagggaccaaggtggaaatcaaac

SEQ ID NO: 10747 - DNA, 334 bp, Homo sapiens
cagtctgtgctgacgcagccgccctcagtgtctggggccccagggcagagggtcaccatctcctgcactgggagcagctccaacatcggggcaggttatgatgtacactggtaccagaagcttccaggaacagcccccaaactcctcatctatggtaacagcaatcggccctcaggggtccctgaccgattctctggctccaagtctggcacctcagcctccctggccatcactgggctccaggctgaggatgaggctgattattactgccactcctatgacagcagcctgagtggtgctgtgttcggaggaggcacccagctgaccgtcctcg

SEQ ID NO: 10748 - DNA, 325 bp, Homo sapiens
tcctatgagctgacacagccaccctcggtgtcagtgtccccaggacagacggccaggatcacctgctctggagatgcattgtcaaagcaatatacttattggtaccagcagaagcccggccaggcccctgtgttggtgatatataaagacagtgagaggccctcagggatccctgagcgattctctggctccagctcagggacaacagtcacgttgaccatcagtggagtccaggcagaagacgaggctgactattactgtcaatcagcagacaccagtggtacttataaggtcttcggaactgggaccaaggtcaccgtcctag

SEQ ID NO: 10749 - DNA, 322 bp, Homo sapiens
gacatccagatgacccagtctccttccaccctgtctgcatctgtaggagacagagtcaccatcacttgccgggccagtcagagtattagtagctggttggcctggtatcagcagaaaccagggaaagcccctaagctcctcatctataaggcatctagtttagaaagtggggtcccatcaaggttcagcggcagtggatctgggacagaattcactctcaccatcagcagcctgcagcctgatgattttgcaacttattactgccaacagtataatagttacccgtggacgttcggccaagggaccaaggtggaaatcaaac

SEQ ID NO: 10750 - DNA, 325 bp, Homo sapiens
tcttctgagctgactcaggaccctgctgtgtctgtggccttgggacagacagtcaggatcacatgccaaggagacagcctcagaagttattatgcaagctggtaccagcagaagccaggacaggcccctggacttgtcatctatggtaaaaataaccggccctcagggatcccagaccgattctctggctccagctcaggaaacacagcttccttgaccatcactggggctcaggcggaagatgaggctgactattactgtaactcccgggacagcagtggtgaccatcccctattcggcggagggaccaagctgaccgtcctag

SEQ ID NO: 10751 - DNA, 319 bp, Homo sapiens
gacatccagatgacccagtctccatcctccctgtctgcatctgtaggagacagagtcaccatcacttgccaggcgagtcaggacattagcaactatttgaattggtatcaacagaaaccagggaaagcccctaagctcctgatctacgatgcatccaatttggatacaggggtcccatcaaggttcagtggaagtggatctgggacagattttactttcaccatcagcagcctgcagcctgacgatattgcaacatattactgtcaacagtatagtaatctcctttctttcggccctgggaccacagtggatatcaaac

SEQ ID NO: 10752 - DNA, 322 bp, Homo sapiens
gacattcagatgacccagtctccatcctccctgtctgcatctgtaggagacagagtcaccatcacttgccgggcgagtcagggcattagcaattctttactctggtatcagcagaaaccagggaaagcccctaagctcctgctctatgctgcatccagattggaaagtggggtcccctccaggttcagtggcagtggatctgggacggattacactctcaccatcagcagcctgcagcctgaagattttgcaacttattactgtcaacagtattatagtaccccgtacacttttggccaggggaccaaggtggagatcaaac

SEQ ID NO: 10753 - DNA, 322 bp, Homo sapiens
gacatccagatgacccagtctccatcctccctgtctgcatctgtaggagacagagtcaccatcacttgccaggcgagtcaggacattagaaactgtttaaattggtatcagcagaaaccagggaaagcccctaagctcctgatctacgatgcctccaatttggaaacaggggtctcatcaaggttcagtggaagtggatctgggacagattttactttcaccatcagcagcctgcagcctgaagatattgcaacatattactgtcaacagtatgatagtttccctccgactttcggccctgggaccaaagtggatgtcaaac

SEQ ID NO: 10754 - DNA, 328 bp, Homo sapiens
tcctatgtgctgactcagccaccctcggtgtcagtggccccaggaaagacggccaggattacctgtggaggaaacaacattggaagtaaaagtgtgcactggtaccagcagaagccaggccaggcccctgtgctggtcgtctatgatgatagcggccggccctcagggatccctgagcgattctctggctccaactctgggaacacggccaccctgaccatcagcagggtcgaagccggggatgaggccgactattactgtcaggtgtgggatagtagtagtgatcatcatgtggtattcggcggagggaccaagctgaccgtcctag

SEQ ID NO: 10755 - DNA, 329 bp, Homo sapiens
tcctatgtgctgactcagccaccctcggtgtcggtggccccaggaaagacggccaggattacctgtgggggaaatgagattggaagtaaaagtgtgcactggtaccaacagaagccaggccaggcccctctgttggtcatctcttatgataccgaccggccctcacggatccctgagcgattctctggctccaactctgggaacacggccaccctgaccatcagcagggtcgaagccggggatgaggccgactattattgtcaggtgtgggatggtactagtgatcatccgggttatgtcttcggcactgggaccaaggtcaccgtcct

SEQ ID NO: 10756 - DNA, 325 bp, Homo sapiens
gacatccagatgacccagtctccatcttccgtgtctgcatctgtaggagacagagtcaccatcacttgtcgggcgagtcaggatagtggcaactggttagcctggtatcagcagaaaccagggaaagcccctaagctcctgatctatgctgcatccagtttgcaaagtggggtcccaggaaggttcagcggcagaggatctgggacagatttcactctcaccatcagcagcctgcagcctgaagactctgcaacttaccattgtcaacaggctaacagtttcccgccgagcacgttcggccaagggaccaaggtggaaatcaaac

SEQ ID NO: 10757 - DNA, 322 bp, Homo sapiens
gaaattgtgttgacacagtctccagccaccctgtctttgtctccaggggaaagagccaccctctcctgcagggccagtcagagtgttagcagctacttagcctggtaccaacagaaacctggccaggctcccaggctcctcatctatgatgcatccaacagggccactggcatcccagccaggttcagtggcagtgggtctgggacagacttcactctcaccatcagcagcctagagcctgaagattttgcagtttattactgtcagcagcgtagcaactggccgtggacgttcggccaagggaccaaggtggaaatcaaac

SEQ ID NO: 10758 - DNA, 328 bp, Homo sapiens
gacatccagatgacccagtctccatcctccctgtctgcatctgtaggagacagagtcatcatcacttgccgggcgagtcagggcattagcaattctttagcctggtatcagcagaaagcagggaaagcccctaagctcctgctctatgctgcatccagattggaaagtggggtcccatccaggttcagtggcagtggatctgggacggagtacactctcaccatcagcagcctgcagcctgaagattttgcaacttattactgtcaacagtattatagtccccttccggcgtacacttttggccaggggaccaagctggagatcaaac

SEQ ID NO: 10759 - DNA, 325 bp, Homo sapiens
gaaattgtgttgacgcagtctccaggcaccctgtctttgtctccaggggaaagagccaccctctcctgcagggccagtcagagtgttagaagcagctacctagcctggtaccagcagaaacctggccaggctcccaggctcctcatccatggtgcatccaggagggccactggcatcccagacaggttcagtggcagtgggtctgggacagacttcactctcaccatcagcagactggagcctgaagattttgcagtgtattactgtcagcagtatggtagctcgatgtacacttttggccaggggaccaagttggagatcaaac

SEQ ID NO: 10760 - DNA, 316 bp, Homo sapiens
tcctatgaactgactcagccaccctcagtgtccgtgtccccaggacagacagccagcatcacctgctctggagataaattgggggataaatatgcttgctggtatcaacagaagccaggccagtcccctgtgctggtcatctatcaagatagcaagcggccctcagggatccctgagcgattctctggctccaactctgggaacacagccactctgaccatcagcgggacccaggctatggatgaggctgactattactgtcaggcgtgggacagcagcgtggtattcggcggagggaccaagctgaccgtcctag

SEQ ID NO: 10761 - DNA, 345 bp, Homo sapiens
cagcctgtgctgactcagccaccttcctcctccgcatctcctggagaatccgccagactcacctgcaccatgcccagtgacatcaatgttggtaattacaacatatactggtaacagcagaagccagggagccctcctaggtatctcctgtactattactcagactcagataagggccagggctctggagtccccagccgcttctctggatccaaagatgcttcagccaatatagggattttactcatctccgggctccagtctgaggatgaggctgactgttcctgtgtgatttggccaagcaatgcttgctattcggcggagggaccaagctgaccgtcctag

SEQ ID NO: 10762 - DNA, 322 bp, Homo sapiens
gacatccagatgacccagtctccatcctccctgtctgcatctgtaggagacagagtcaccatcacttgccgggcaagtcagagcattagcagctatttaaattggtatcagcagaaaccagggaaagcccctaagctcctgatctatgctgcatccagtttgcaaagtggggtcccatcaaggttcagcggcagtggatctgggacagaattcactctcaccatcagcagcctgcagcctgatgattttgcaacttattactgccaacagtataatagttatcggtggacgttcggccaagggaccaaggtggaaatcaaac

SEQ ID NO: 10763 - DNA, 322 bp, Homo sapiens
gccatccggataacccagtctccatcctcactctctgcatctacaggagacagagtcaccatcacttgtcgggcgagtcagggtattagcagttatttagcctggtatcagcaaaaaccagggaaagcccctaagctcctgatctatgctgcatccactttgcaaagtggggtcccatcaaggttcagcggcagtggatctgggacagatttcactctcaccatcagcagtctgcaacctgaagattttgcaacttactactgtcaacagagttacactaccccgtggacgttcggccaagggaccaaggtggaaatcaaac

SEQ ID NO: 10764 - DNA, 322 bp, Homo sapiens
gacatccagatgacccagtctccttccaccctgtctgcatctgtaggagacagagtcaccatcacttgccgggccagtcagagtattagtagttggttggcctggtatcagcagaaaacagggaaagcccctaagctcctgatttataaggcgtctagtttagaaagtggggtcccatcaaggttcagcggcagtggatctgggacagaattcactctcaccatcagcagcctggagcctgatgattttgcaacttattactgccaacagtataatagttatttgtggacgttcggccaagggaccaaggtggaaatcaaac

SEQ ID NO: 10765 - DNA, 322 bp, Homo sapiens
gaaatagtgatgacgcagtctccagccaccctgtctgagtctccaggggaaagagtcaccctctcctgcagggccagtcagagtgttagcagcaacttagcctggtaccagcagaaacctggccaggctcccaggctcctcatctatggtgcatccaccagggccactggtttcccagccaggttcggtggcagtgggtctgggacagagttcactctcaccatcagcagcctgcagtctgaagattttgcagtttattactgtcagcagtataataactggcctctcactttcggcggagggaccacggtggagatcaaac

SEQ ID NO: 10766 - DNA, 325 bp, Homo sapiens
gaaattgtgttgacgcagtctccaggcaccctgtctttgtctccaggggaaagagccaccctctcctgcagggccagtcagagtgttagcagcagcaacttagcctggtaccagcagaaacctggccaggctcccaggctcctcatctatggtgcatccagcagggccactggcatcccagacaggttcagtggcagtggatctgggacagacttcactctcaccatcagcagactggagcctgaagatttcgcagtgtattactgtcagcagtatggtagctcaccgatcaccttcggccaagggacacgactggagattaaac

SEQ ID NO: 10767 - DNA, 322 bp, Homo sapiens; identical to SEQ ID NO: 9405

SEQ ID NO: 10768 - DNA, 315 bp, Homo sapiens
cctatgtgctgactcagccaccctcagtgtcagtggccccaggaaagacggccaggattacctgtgggggagacaacattggaagtaaaagtgtgcactggtaccagcagaagccaggccaggcccctgtagtggtcatctattatgataatgaccggccctcagggatccctgagcgcttctctggctccaattctgggaacacggccaccctgaccatcagcagggtcgaagccggggatgaggccgactatcactgtcaggtgtgggatgtgggagtggtattcggcggcgggaccaagctgaccgtcctag

SEQ ID NO: 10769 - DNA, 325 bp, Homo sapiens
gaaatagtgatgacgcagtctccagccaccctgtctgtgtctccaggggaaagagccaccctctcctgcagggccagtcagagtgttagcagcaacttagcctggtaccagcagaaacctggccaggctcccaggctcctcatctatggtgcatccaccagggccactggtatcccagccaggttcagtggcagtgggtctgggacagagttcactctcaccatcagcagcctgcagtctgaagattttgcactttattactgtcagcagtataataactggcctttgtggacgttcggccaagggaccaaggtggaaatcaaac

SEQ ID NO: 10770 - DNA, 322 bp, Homo sapiens
cagtctgccctgactcagcctgcctccgtgtctgggtctcctggacagtcgatcaccatctcctgcactgcaaccagcagttataactatgtctcctggtaccaacaccacccaggcaaagcccccaaactcatgatttatgatgtcagtaatcggccctcaggggtttctaatcgcttctctggctccaagtctggcaacacggcctccctgaccatctctgggctccaggctgaggacgaggctgattattactgcagctcatatacaagcaccagcactctttgggtgttcggcggagggaccaagctgaccgtcctag

SEQ ID NO: 10771 - DNA, 325 bp, Homo sapiens
gaaattgtgttgacgcagtctccaggcaccctgtctttgtctccaggggaaagagccaccctctcctgcagggccagtcagagtgttagcagcagctacttagcctggtaccagcagaaacctggccaggctcccaggcccctcatctatggtgcatccagcagggccactggcatcccagacaggttcagtggcagtgggtctgggacagacttcactctcaccatcagcagactggagcctgaagattctgcagtgtattactgtcagcaatatgataactcacctaggacgttcggccaagggaccaaggtggaaatcaaac

SEQ ID NO: 10772 - DNA, 331 bp, Homo sapiens
cagtctgccctgactcagcctgcctccgtgtctgggtctcctggacagtcgatcaccatctcctgcactggaaccagcagtgacgttggtggttataactatgtctcctggtaccaacagcacccaggcaaagcccccaaactcatgatttatgatgtcagtaatcggccctcaggggtttctaatcgcttctctggctccaagtctggcaacacggcctccctgaccatctctgggctccaggctgaggacgaggctgattattactgcagctcatatacaagcagcagcactctggtattcggcggagggaccaagctgaccgtcctag

SEQ ID NO: 10773 - DNA, 319 bp, Homo sapiens
gacatccagatgacccagtctccatcctccctgtctgcatctgtaggagacagagtcaccatcacttgccaggcgagtcaggacattagcaactatttaaattggtatcagcagaaaccagggaaagcccctaagctcctgatctacgatgcatccaatttggaaacaggggtcccatcaaggttcagtggaagtggatctgggacagattttactttcaccatcagcagcctgcagcctgaagatattgcaacatattactgtcaacagtatgataatctcctcactttcggcggagggaccaaggtggagatcaaac

SEQ ID NO: 10774 - DNA, 322 bp, Homo sapiens
gaaattgtgttgacacagtctccagccaccctgtctttgtctccaggggaaagagccaccctctcctgcagggccagtcagagtgttagcagctacttagcctggtaccaacagaaacctggccaggctcccaggctcctcatctatgatgcatccaacagggccactggcatcccagccaggttcagtggcagtgggtctgggacagacttcactctcaccatcagcagcctagagcctgaagattttgcagtttattactgccagcagcgtagcaactggccgctcactttcggcggagggaccaaggtggagatcaaac

SEQ ID NO: 10775 - DNA, 325 bp, Homo sapiens
tcctatgtgctgactcagccaccctcagtgtcagtggccccaggaaagacggccaggattacctgtgggggaaacaacattggaagtaaaagtgtgcattggtaccagcagaagccaggccaggcccctgtgctggtcatctattatgatagtgaccggccctcagggatccctgagcgattctctggctccaactctgggaacacggccaccctgaccatcagcagggtcgaagccggggatgaggccgactattactgtcaggtgtgggatagtaatagtgatcatgtgacattcggcggagggaccaagctgaccgtcctag

SEQ ID NO: 10776 - DNA, 311 bp, Homo sapiens
gaaatagtgatgacgcagtctccagccaccctgtctgtgtctccaggggaaagagccaccctctcctgcagggccagtcagagtgttagcagcaacttagcctggtaccagcagaaacctggccaggctcccaggctcctcatctatggtgcatccaccagggccactggtatcccagccaggttcagtggcagtgggtctgggacagagttcactctcaccatcagcagcctgcagtctgaagattttgcagtttattactgtcagcagtataataacttttggccaggggaccaagctggagatcaaac

SEQ ID NO: 10777 - DNA, 334 bp, Homo sapiens
cagtctgccctgactcagcctgcctccgtgtctgggtctcctggacagtcgatcaccatctcctgcactggaaccagcagtgacgttggtggtgataactgtgtctcctggtaccaacagcacccaggcaaagcccccaaactcatgatttatgatgtcagtaatcggccctcaggggtttctaatcgcttctctgcctccaagtctggcaacacggcctccctgaccatctctgggctccaggctgaggacgaggctgattactactgcagctcatatacaagcagcagcactcattgggtgttcggcggagggaccaagctgaccgtcctag

SEQ ID NO: 10778 - DNA, 334 bp, Homo sapiens
cagtctgccctgactcagcctgcctccgtgtctgggtctcctggacagtcgatcaccatctcctgcactggaaccagcagtgacgttggtggttataactatgtctcctggtaccaacagcacccaggcaaagcccccaaactcatgatttatgatgtcagtaatcggccctcaggggtttctaatcgcttctctggctccaagtctggcaacacggcctccctgaccatctctgggctccaggctgaggacgaggctgattattactgcagctcatatacaagcagcagcactctcggggtattcggcggagggaccaagctgaccgtcctag

SEQ ID NO: 10779 - DNA, 325 bp, Homo sapiens
tcctatgagctgacacaggcaccctcggtgtcagtgtccccaggacagacggccaggatcacctgctctggagatgcattgccaaagcaatatgctcattggtaccagcagaagccaggccaggcccctgtgctggtgatatataaagacagtgagaggccctcagggatccctgagcgattctctggctccagctcagggacaacagtcacgttgaccatcagtggagtccaggcagaagacgaggctgactattactgtcaatcagcagacagcagtggtacttatccggtattcggcggagggaccaagctgaccgtcctag

SEQ ID NO: 10780 - DNA, 325 bp, Homo sapiens
cagtctgccctgactcagcctgcctccgtgtctgggtctcctggacagtcgatcaccatctcctgcactggaaccagcagtgatgttgggagttataaccttgtctcctggtaccaacaacacccaggcaaagtccccaaactcatgatttatgaggtcagtaagcggccctcaggggtttctaatcgtttctctggctccaagtctggcaacacggcctccctgacaatctctgggctccaggctgaggacgaggctgattattactgctgctcatatgcaggtagttgggtgttcggcggagggaccaagctgaccgtcctag

SEQ ID NO: 10781 - DNA, 337 bp, Homo sapiens
cagtctgccctgactcagcctgcctccgtgtctgggtctcctggacagtcgatcaccatctcctgcactggaaccagcagtgacgttggtgcttgtaactgtgtctcctggtaccaacagcacccaggcaaagcccccaaactcatgatttatgatgtcagtcatcggccctcaggggtttctaatcgcttctctggctccaagtctggcaacacggcctccctgaccatctctgggctccaggctgaggacgaggctgaatattactgcagctcatatacaagcagtagcactctcgatgtggtcttcggcggagggaccaagctgaccgtcctag

SEQ ID NO: 10782 - DNA, 331 bp, Homo sapiens
cagtctgtgttgacgcagccgccctcagtatctgcggccccaggacagaaggtcaccatctcctgctctggaagcagctccaacattgggaataattatgtatcctggtaccagcaactcccaggaacagcccccaaactcctcatttatgacaatggtaagcgaccctcagggattcctgaccgattctctggctccaagtctggcacgtcagccaccctgggcatcaccggactccagactggggacggggccgattattactgcggaacatgggatagcagcctgagtgctgtggtattcggcggagggaccaagctgaccgtcctag

SEQ ID NO: 10783 - DNA, 322 bp, Homo sapiens
gccatccggataacccagtctccatcctcactctctgcatctacaggagacagagtcaccatcacttgtcgggcgagtcagggtattagcagttatttagcctggtatcagcaaaaaccagggaaagcccctaagctcctgatctatgctgcatccactttgcaaagtggggtcccatcaaggttcagcggcagtggatctgggacagatttcactctcaccatcagctgcctgcagtctgaagattttgcaacttattactgtcaacagtattatagttacctgctcactttcggcggagggaccaaggtggagatcaaac

SEQ ID NO: 10784 - DNA, 331 bp, Homo sapiens
cagtctgtgttgacgcagccgccctcagtgtctgcggccccaggacagaaggtcaccatctcctgctctggaagcagctccaacattgggaataattatgtatcctggtaccagcagctcccaggaacagcccccaaactcctcatctatgaaaataataagcgaccctcagggattcctgaccgattctctggctccacgtctggcacgtcagccaccctgggcatcaccggactccagactggggacgaggccgattattactgcggaacatgggatagcagcctgagtgccgtggtattcggcggagggaccaagctgaccgtcctag

SEQ ID NO: 10785 - DNA, 320 bp, Homo sapiens
gacatccagatgacccagtctccatcctccctgtctgcatctgtaggagacagagtcaccgtcacttgccgggcgagtcagggcattagcaattatttagcctggtatcagcagaaaccagggaaagttcctacgctcctgatctatgctgcatccactttgcaatctggggtcccatctcggttcagtggcagtggatctgggacagatttcactctcaccatcagcagcctgcagcctgaagatgttgcaacttactactgtcaaaagtataacagtgccccattcactttcggccctgggaccaaagtggatatcaa

SEQ ID NO: 10786 - DNA, 331 bp, Homo sapiens
cagtctgccctgactcagcctgcctccgtgtctgggtctcctggacagtcgatcaccatctcctgcactggaaccagcagtgacgttggtggttataactatgtctcctggtaccaacaccacccaggcaaagcccccaaactcatgatttttgatgtcagtaatcggccctcaggggtttctaatcgcttctctggctccaagtctggcaacacggcctccctgaccatctctgggctccaggctgaggacgaggctgattattactgcagctcttttacaagcatcagcactctagtcttcggaactgggaccaaggtcaccgtcctag

SEQ ID NO: 10787 - DNA, 331 bp, Homo sapiens
cagtctgccctgactcagcctgcctccgtgtctgggtctcctggacagtcgatcaccatctcctgcactggaaccagcagtgacgttggtggttataactatgtctcctggtaccaacagcacccaggcaaagcccccaaactcattatttatgatgtcagtaatcggccctcaggggtttctaatcgcttctctggctccaagtctggcaacacggcctccctgaccatctctgggctccaggctgaggacgaggctgattattactgcagctcatatacaagcaccagcactgaggtattcggcggagggaccaagctgaccgtcctag

SEQ ID NO: 10788 - DNA, 337 bp, Homo sapiens
cagtctgtgctgacgcagccgccctcagtgtctggggccccagggcagagggtcaccatctcctgcactgggagcagctccaacatcggggcaggttatgatgtacactggtaccagcagcttccaggaacagcccccaaactcctcatctatggtaacagcaatcggccctcaggggtccctgaccgattctctggctccaagtctggcacctcagcctccctggccatcactgggctccaggctgaggatgaggctgattattactgccagtcctatgacagcagcctgagtggttcggtggtattcggcggagggaccaagctgaccgtcctag

SEQ ID NO: 10789 - DNA, 331 bp, Homo sapiens
cagtctgccctgactcagcctgcctccgtgtctgggtctcctggacagtcgatcaccatctcctgcactggaaccagcagtgacgttggtggttataactatgtctcctggtaccaacaacacccaggcaaagtccccaaactcatgatttatgatgtcagtaatcggccctcaggggtttctgatcgcttctctggctccaagtctggcaacacggcctccctgaccatctctgggctccaggctgaggacgaggctgattattactgcagctcatttacaagtaccagcactctggtattcggcggagggaccaagctgaccgtcctag

SEQ ID NO: 10790 - DNA, 331 bp, Homo sapiens
cagtctgccctgactcagcctgcctccgtgtctgggtctcctggacagtcgatcaccatctcctgcactggaaccagcagtgacgttggtggttataactatgtctcctggtaccaacagcacccaggcaaagcccccaaactcatgatttatgatgtcagtaatcggccctcaggggtttctaatcgcttctctggctccaagtctggcaacacggcctccctgaccatctctgggctccaggctgaggacgaggctgattattactgcagctcatatacaagcagcagcttttgggtgttcggcggagggaccaagctgaccgtcctag

SEQ ID NO: 10791 - DNA, 325 bp, Homo sapiens
gacatccagatgacccagtctccatcctccctgtctgcatctgtaggagacagagtcaccatcacttgccaggcgagtcaggacattagcaactatttaaattggtatcagcagaaaccagggaaagccccgaagctcctgatctacgatgcatccaatttggaaacaggggtcccatcaaggttcagtggaagtggatctgggacagattttactttcaccatcaacagcctgcagcctgaagatattgcaacatattactgtcaacagtatgataatctccccttattcactttcggccctgggaccaaagtggatatcaaac

SEQ ID NO: 10792 - DNA, 319 bp, Homo sapiens
gacatccagttgacccagtctccatccttcctgtctgcatctgtaggagacagagtcaccatcacttgccgggccagtcagggcattagcagttatttagcctggtatcagcaaaaaccagggaaagcccctaagctcctgatctatgctgcatccactttgcaaagtggggtcccatcaaggttcagcggcagtggatctgggacagaattcactctcacaatcagcagcctacagcctgaagattttgcaacttattactgtcaacaacttaatagttacccgctcactttcggcggagggaccaaggtggagatca

SEQ ID NO: 10793 - DNA, 325 bp, Homo sapiens
tccaatgagctgacgcagccaccctcggtgtcagtgtccccaggacaaacggccaggatcacctgctctggagatgcattgccaaaaaaatatgcttattggtaccagcagaagtcaggccaggcccctgtgctggtcatctatgaggacagcaaacgaccctccgggatccctgagagattctctggctccagctcagggacaatggccaccttgactatcagtggggcccaggtggaggatgaagctgactactcctgttactcaacagacagcagtggtaatcatagggtgttcggcggagggaccaagctgaccgtcctag

SEQ ID NO: 10794 - DNA, 330 bp, Homo sapiens
cagtctgccctgactcagcctgcctccgtgtctgggtctcctggacagtcgatcaccatctcctgcactggaaccagcagtgacgttggtggttataactatgtctcctggtaccaacagcacccaggcaaagcccccagactcatgatttatgatgtcagtaatcggccctcaggggtttctagtcgcttctctggctccaagtctggcaacacggcctccctgaccatctctgggctccaggctgaggacgaggctgattattactgcagctcatttacaagcatcagcacttgggtgttcggcggagggaccaagctgaccgtccta

SEQ ID NO: 10795 - DNA, 337 bp, Homo sapiens
gaaattgtgatgacccagactccactctcctcacctgtcacccttggacagccggcctccatctcctgcaggtctaatcaaagcctcgtacacagtgatggaaacacctacttgagttggcttcagcagaggccaggccagcctccaagactcctaatttataagatttctaaccggttctctggggtcccagacagattcagtggcagtggggcagggacagatttcacactgaaaatcagcagggtggaagctgaggatgtcggggtttattactgcatgcaagctacacaatttccgcacacttttggccaggggaccaagctggagatcaaac

SEQ ID NO: 10796 - DNA, 322 bp, Homo sapiens; identical to SEQ ID NO: 9392

SEQ ID NO: 10797 - DNA, 325 bp, Homo sapiens
tcttctgagctgactcaggaccctgctgtgtctgtggccttgggacagacagtcaggatcacatgccagggagacagcctcagaagctattatgcatgctggtaccagcagaagccaggacaggcccctgtacttgtcatctttcctaaaaacaaccggccctcagggatcccagaccgattctctggctccagctcaggaaacacagcttccctgaccatcactggggctcaggcggaagatgaggctgactattactgttactcccgggacagcagtgataaccattgggtgttcggcggagggaccaagctgaccgtcctag

SEQ ID NO: 10798 - DNA, 325 bp, Homo sapiens
tcgtatgaactggctcagccaccctcggtgacagtgtccccaggacagacggccaggatcccctgctctggagatgcactgccaaagcaatatgcttattggtaccagcagaagtcagggcaggcccctgtgatggtgatatataaagacagtgagaggccctcagggatccctgagcgaatctctggctccagctcagggacaacagtcacgttgaccatcagtggagtccaggcagaagacgaggctgactattactgtcaatcaacagacaccagtgggacttatgtggttttcggcggagggaccaagctgaccgtcctag

SEQ ID NO: 10799 - DNA, 322 bp, Homo sapiens
gacatccagatgacccagtctccttccaccctgtctgcatctgtaggagacagagtcaccatcacttgccggaccagtcagagtatcagtagctggttggcctggtaccagcaaaaaccagggaaagcccctaagttcctgatccataaggcgtctagtttagaaagtggggtcccgtcaaggttcagcggcagtggatctgggacagaattcactctcaccatcagcagcctgcagcctgatgattttgcaacttattactgccaacagtataatagttatccgtggacgttcggccaagggaccaaggtggaaatcaaac

SEQ ID NO: 10800 - DNA, 322 bp, Homo sapiens
gccatccggataacccagtctccatcctcactctctgcatctacaggagacagagtcaccatcacttgtcgggcgagtcagggtattagcagttatttagcctggtatcagcaaaaaccagggaaagcccctaagctcctgatctatgctgcatccactttgcaaagtggggtcccatcaaggttcagcggcagtggatctgggacagatttcactctcaccatcagctgcctgcagtctgaagattttgcaacttattactgtcaacagtattatagttacccgtggacgttcggccaagggaccaaggtggaaatcaaac

SEQ ID NO: 10801 - DNA, 325 bp, Homo sapiens
tcctatgagctgacacagccaccctcggtgtcagtgtccccaggacaaacggccaggatcacctgctctggggatgcattgccaaaaaaatatgcttattggtaccagcagaagtcaggccaggcccctgtgctggtcatctatgaggacagcaaacgaccctccgggatccctgagagattctctggctccagctcagggacaatggccaccttgattatcagtggggcccaggtggaggatgaagctgactactactgttactcaacagacagcagtggtcatcagagggtgttcggcggagggaccaagctgaccgtcctag

SEQ ID NO: 10802 - DNA, 319 bp, Homo sapiens
tcctatgagctgactcagccaccctcagtgtccgtgtccccaggacagacagccagcatctcctgctctggagataaattggggaataaatatacttgctggtatcagcagaaggcgggccagtcccctgtgctggtcatccatcaagataccaagcggccctcagggatccctgagcgattctctggctccaactctgggaacacagccactctgaccatcagtgggacccaggctatggatgaggctgactattactgtcaggcgtgggacagcgacactgtggtattcggcggagggaccaaactgaccgtcctag

SEQ ID NO: 10803 - DNA, 322 bp, Homo sapiens; identical to SEQ ID NO: 837

SEQ ID NO: 10804 - DNA, 325 bp, Homo sapiens
tcctatgtgctgcctcagccaccctcagtgtcagtggccccaggaaagacggccaggataacctgtgaaggaaacaacattggaagtaaaagtgtgcactggtaccagcagaagccaggccaggcccctgtgctggtcatctattatgatagcgaccggccctcagggatccctgagcgattctctggctccaactctgggaacacggccaccctgaccatcagcagggtcgaagccggggatgaggccgacttttactgtcaggtgtgggatagtagtactgatcatgtggtattcggcggagggaccaagctgaccgtcctag

SEQ ID NO: 10805 - DNA, 322 bp, Homo sapiens; identical to SEQ ID NO: 927

SEQ ID NO: 10806 - DNA, 331 bp, Homo sapiens; identical to SEQ ID NO: 10772

SEQ ID NO: 10807 - DNA, 323 bp, Homo sapiens
tcctatgtgctgactcagccaccctcggtgtcagtggccccaggaaagacggccaggattacctgtgggggaaacaacattggaagtaaaaatgtgcactggtaccagcagaagccaggccaggcccctgtgctggtcgtctatgatgatagcgaccggccctcaggggtccctgagcgattctctggctccaactctgggaacacggccaccctgaccatcagcagggtcgaggccggggatgaggccgactattactgtcaggtgtgggatagtagtggtgatcattgggtgttcggcggagggaccaagctgaccgtcct

SEQ ID NO: 10808 - DNA, 322 bp, Homo sapiens
gacatccagatgacccagtctccatcctccctgtctgcatctgtaggagacagagtcaccatcacttgccgggcgagtcagggcattagttattatttagcctggtatcagcggaaaccagggaaagttcctaagctcctgatctatgctgcatccactttgcaatcaggggtcccatctcggttcagtggcagtggatctgggacagatttcactctcaccatcagcagcctgcagcctgaagatgttgcaacttatttctgtcaacagtataacagtgccctcatcactttcgccggagggaccaaggtggagatcaaac

SEQ ID NO: 10809 - DNA, 310 bp, Homo sapiens
gacatccagatgacccagtctccttccaccctgtctgcatctgtaggagacagagtcaccatcacttgccgggccagtcagagtattagtagttggttggcctggtatcagcagaaaccagggaaagcccctaagctcctgatctataaggcatctagtttagaaagtggggtcccatcaaggttcagcggcagtggatctgggacagaattcactctcaccatcagcagccagcagcctgatgattttgcaacttattactgccaacaccagtggacgttcggccaagggaccaaggttgaaatcaaac

SEQ ID NO: 10810 - DNA, 337 bp, Homo sapiens
gatattgtgatgactcagtctccactctccctgcccgtcacccctggagagccggcctccatctcctgcaggtctagtcagagcctcctgcatagtaatggacacaagtatttggattggtacctgcagaagccagggcaggctccacagctcctgatctatttgggttccaatcgggcctccggggtccctgacaggttcagtggcagtggatcaggcacagattttacactgaaaatcagcagagtggaggctgaggatgttggggtttattactgcatgcaagctctacaaacacccctcactttcggcggagggaccaaggtggagatcaaac

SEQ ID NO: 10811 - DNA, 322 bp, Homo sapiens
gacatccagatgacccagtctccatcctcactgtctgcatctgtaggagacagagtcaccatcacttgtcgggcgagtcagggcattagcaattatttagcctggtttcagcagaaaccagggaaagcccctaagtccctgatctatgctgcatccagtttgcaaagtggggtcccatcaaagttcagcggcagtggatctgggacagatttcactctcaccatcagcagcctgcagcctgaagattttgcaacttattactgccaacagtataatagttaccctctgacgttcggccaagggaccaaggtggaaatcaaac

SEQ ID NO: 10812 - DNA, 319 bp, Homo sapiens
gaaatagtgatgacgcagtctccagccaccctgtctgtgtctccaggggaaagagccaccgtctcctgcagggccagtcagagtgttagcagcaacttagcctggtaccagcagaaacctggccaggctcccaggctcctcatctatggtgcatccaccagggccactggaatcccagccaggttcagtggcagtgggtctgggacagagttcactctcaccatcagcagcctgcagtctgaagattttgcagtttattactgtcagcagtatgataactggttcactttcggccctgggaccaaagtggatatcaaac

SEQ ID NO: 10813 - DNA, 319 bp, Homo sapiens
gaaatagtggtgacgcagtctccagccaccctgtctgtgtctccaggggacagagccaccctctcctgcagggccagtcagagtgttagcaccaacttagtctggtaccagcagaaacctggccaggctcccaggctcctcatctacggtgcatccaccagggccactggtatccccgccaggttcagtggcagtgggtctgggacagagttcactctcaccatcagcagcctgcagtctgaagattttgcagtttatttctgtcagcaatatgataactggttcactttcggccctgggaccaaagtggatatcaaac

SEQ ID NO: 10814 - DNA, 325 bp, Homo sapiens
tcctatgagctgacacagccaccctcggtgtcagtgtccccaggacaaacggccaggatcacctgctctggagatgcattgccaaaaaaatatgcttattggtaccagcagaagtcaggccaggcccctgtgctggtcatctatgaggacagcaaacgaccctccgggatccctgagagattctctggctccagctcagggacaatggccaccttgactatcagtggggcccaggtggaggatgaagctgactactactgttactcaacagacggcagtggtaatcagtgggtgttcggcggagggaccaagctgaccgtcctag

SEQ ID NO: 10815 - DNA, 328 bp, Homo sapiens
gacatccagatgacccagtctccatcctccctgtctgcatctgtaggagacagagtcaccatcacttgccaggcgagtcaggacattagcaactatttaaattggtatcagcagaaaccagggaaagcccctaagctcctgatctatgctgcatccagtttgcaaagtggggtcccatcaaggttcagtggcagtggatctgggacagacttcactctcaccatcagcagactggagcctgaagattttgcagtgtattactgtcagcagtatggtagctcacctccggagatcaccttcggccaagggacacgactggagattaaac

SEQ ID NO: 10816 - DNA, 322 bp, Homo sapiens
gacatccagatgacccagtctccatcctcactgtctgcatctgtaggagacagagtcaccatcacttgtcgggcgagtcagggtattagcaggtggttagcctggtatcagcagaaaccagagaaagcccctaagtccctgatctttgctgcatccagtttgcaaagtggggtcccatcaaggttcagcggcagtggatctgggacagacttcactctcaccatcagcagcctgcagcctgaagattttgcaacttattactgccatcagtataatagttaccctctcaccttcggccaagggacacgactggagattaaac

SEQ ID NO: 10817 - DNA, 334 bp, Homo sapiens
cagtctgccctgactcagcctgcctccgtgtctgggtctcctggacagtcgatcaccatctcctgcactggaaccagcagtgatgttgggagttataaccttgtctcctggtaccaacagcacccaggcaaagcccccaaactcatgatttatgaggtcagtaagcggccctcaggggtttctaatcgcttctctggctccaagtctggcaacacggcctccctgacaatctctgggctccaggctgaggacgaggctgattattactgctgctcatatgcaggtagtagcactttttgggtgttcggcggagggaccaagctgaccgtcctag

SEQ ID NO: 10818 - DNA, 316 bp, Homo sapiens
tcctatgtgctgactcagccaccctcagtgtcagtggccccagggaagacggccaggattacctgtgggggaaacagtattggaagtaaaagtgtgcactggtaccagcagaagccaggccaggcccctgtgctggtcatctattatgatagtgaccggccctcagggatccctgagcgattctctggctccaactctgggaacacggccaccctgaccatcagcagggtcgaagccggggatgaggccgactatttctgtcaggtgtgggataccaacggtgtcttcggaactgggaccaaggtcaccgtcctag

SEQ ID NO: 10819 - DNA, 325 bp, Homo sapiens
gaaatagtgatgacgcagtctccagccaccctgtctgtgtctccaggggaaagagccaccctctcctgcagggccagtcagagtgttagcagcaacttagcctggtaccagcagaaacctggccaggctcccaggctcctcatctatggtgcatccaccagggccactggtatcccagccaggttcagtggcagtgggtctgggacagagttcactctcaccatcagcagcctgcagtctgaagattttgcagtttattactgtcagcagtataataactggcctacgtggacgttcggccaagggaccaaggtggaaatcaaac

SEQ ID NO: 10820 - DNA, 328 bp, Homo sapiens
tcctatgtgctgactcaggcaccctcggtgtcagtggccccaggaaagacggccaggattacctgtgggggaaacaacattggaagtaaaaatgtgcactggtaccagcagaagccaggccaggcccctgtgctggtcgtctttgatgataacgaccggccctcagggatccctgagcgattctctggctccaactctggggacacggccaccctgaccatcagcagggtcgaagccggggatgaggccgactattactgtcaggtgtgggatagtagtagtgatcatcattgggtgttcggcggagggaccaagctgaccgtcctag

SEQ ID NO: 10821 - DNA, 322 bp, Homo sapiens
gacatccagatgacccagtctccatcctccctgtctgcatctgttggagacagagtcaccatcacttgccgggcgagtcagggcattagcaactctttagcctggtctcagcacaaaccagggaaagccccaaagctcctgctctatggtgcatccaggttggaaagtggggtcccatccaggttcagtggcagtggatccgggacggattacactctcaccatcagcagcctgcagcctgaagattttgcaacttattactgtcaacagtattatagtacccctccgacgttcggccaagggaccaaggtggaaatcaaac

SEQ ID NO: 10822 - DNA, 322 bp, Homo sapiens
gacatccagatgacccagtctccatcctccctgtctgcatctgtaggagacagagtcaccatcacttgccgggcgagtcagggcgttaacaattctttagcctggtgtcagcagaaaccagggaaagcccctaagctcctgctctatgctgcatccagattggaaagtggggtcccatccaggttcagtggcagtggatcagggacggattccactctcaccatcagcagcctgcagcctgaagattttgcaacttattactgtcaacagtattatagtacccctccgacgttcggccaagggaccaaggtggaaatcaaac

SEQ ID NO: 10823 - DNA, 340 bp, Homo sapiens
gacatcgtgatgacccagtctccagactccctggctgtgtctctgggcgagagggccaccatcaactgcaagtccagccagagtgtcttatacagctccaacaataagagttacttaggttggtaccagcagaaaccaggacagcctcctaagctgctcatttactgggcatctacccgggaatccggggtccctgaccgattcagtggcagcgggtctgggacagatttcactctcaccatcagcagcctgcaggctgaagatgtggcagtttattactgtcagcaatattatagtactcctctcactttcggcggagggaccaaggtggagatcaaac

SEQ ID NO: 10824 - DNA, 319 bp, Homo sapiens
tcctatgagctgactcagccaccctcagtgtccgtgtccccaggacagacagccagcatcacctgctctggagataaattgggggataaatatgcttgctggtatcagcagaagccaggccagtcccctgtggtagtcatctatgaagataccaagcggccctcagggatccctgagcgattctctggctccaactctgggaacacagccactctgaccatcagcgggacccaggctgtggatgaggctgactattactgtcaggcgtgggacagcagcactgtggtattcggcggagggaccaagctgaccgtcctag

SEQ ID NO: 10825 - DNA, 322 bp, Homo sapiens
gacatccagatgacccagtctccatcctccctgtctgcatctgtaggagacagagtcaccgtcacttgccgggcgagtcaggacattagcaattctttagcctggtttcagcagaaaccagggacagcccctaagctcctgctctatgcagcatccagattggaaagtggggtcccatccaggttcagtggcagtggatctgggacggatcacactctcaccatcagcagcctgcagcctgaagattttgcaacttattactgtcaacagtattatagtacccctccgacgttcggccaagggaccaaggtggaaatcaaac

SEQ ID NO: 10826 - DNA, 328 bp, Homo sapiens
gaaattgtgttgacgcagtctccaggcaccctgtctttgtctccaggggaaagagccaccctctcctgcagggccagtcagagtgttagcagcagctacttagcctggtaccagcagaaacctggccaggctcccaggctcctcatctatggtgcatccagcagggccactggcatcccagacaggttcagtggcagtgggtctgggacagacttcactctcaccatcagcagactggagcctgaagattttgcagtgtattactgtcagcagtatggtagttcacctctttggacgttcggccaagggaccaaggtggaaatcaaac

SEQ ID NO: 10827 - DNA, 331 bp, Homo sapiens
cagtctgccctgactcagcctgcctccgtgtctgggtctcctggacagtcgatcaccatctcctgcactggaaccagcagtgacgttggtgcttataactctgtctcctggtaccaacaccacccaggcaaagcccccaaactcttgatttatgatgtcagtaatcggccctcaggggtttctgatcgcttctctggctccaggtctggcaacacggcctccctgaccatctctgggcttcaggctgaggacgaggctgattattactgcagctcatatacaagcagcagcacttgggtgttcggcggagggaccaagctgaccgtcctag

SEQ ID NO: 10828 - DNA, 325 bp, Homo sapiens
gaaattgtgttgacgcagtctccaggcaccctgtctttgtctccaggggaaagagccaccctctcctgcagggccagtcagagtgttagcagcaactacttagcctggtaccagcagaaacctggccaggctccccggctcctcatctatgatgcatcctccagggccactggcatcccacacaggttcagtggcagtgggtctgggacagacttcactctcaccatcagcagactggagtctgcagattttgcagtgtattactgtcagcagtatgctggttcacctttcactttcggcactgggaccaaagtggatgtcaaac

SEQ ID NO: 10829 - DNA, 340 bp, Homo sapiens
gacatcgtgatgacccagtctccagactccctggctgtgtctctgggcgagagggccaccatcaactgcaagtccagccagactgttttatacagctccaacaataagaactacttagcttggtaccagcagagaccaggacagcctcctaagttgctcattaattgggcatctgcccgggaatccggggtccctgaccgattcagtggcagcgggtctgggacagatttcactctcaccatcagcagcctgcaggctgaagatgtggcagtttattactgtcagcaatattttagtcctccgtggacgttcggccaagggaccaaggtggaaatcaaac

SEQ ID NO: 10830 - DNA, 340 bp, Homo sapiens
gacatcgtgatgacccagtctccagactccctggctgtgtctctgggcgagagggccaccatcaactgcaagtccagccagactgttttatacagctccaacaataagaactacttagcttggtaccagcagagaccaggacagcctcctaagttgctcattaattgggcatctacccgggaatccggggtccctgaccgattcagtggcagcgggtctgggacagatttcactctcaccatcagcagcctgcaggctgaagatgtggcagtttattactgtcagcaatattttagtcctccgtggacgttcggccaagggaccaaggtggaaatcaaac

SEQ ID NO: 10831 - DNA, 325 bp, Homo sapiens
gaaatagtgatgacgcagtctccagccaccctgtctgtgtctccaggggaaagagccaccctctcctgcagggccagtcagagtgttagcagcgacttagcctggtaccagcagaaacctggccaggctcccaggctcctcatctatggtgcatccaccagggccactggtatcccagccaggttcagtggcagtgggtctgggacagagttcactctcaccatcagcagcctgcagtctgaagattttgcagtttatttctgtcagcagtataataactggcctccgttcactttcggccctgggaccaaagtggatatcaaac

SEQ ID NO: 10832 - DNA, 340 bp, Homo sapiens; identical to SEQ ID NO: 3951

SEQ ID NO: 10833 - DNA, 331 bp, Homo sapiens
cagactgtggtgacccaggagccatcgttctcagtgtcccctggagggacagtcacactcacttgtggcttgagctctggctcagtctctactagtaactaccccagctggtaccagcagaccccaggccaggctccacgcccgctcatttatagcacaaatactcgctcttctggggtccctgatcgcttctctggctccatccttgggaacaaagctgccctcaccatcacgggggcccaggcagatgatgaatctgattattactgtgtgctgtatatggggagtggggtctgggtgttcggcggagggaccaagctgaccgtcctag

SEQ ID NO: 10834 - DNA, 331 bp, Homo sapiens
cagtctgccctgactcagcctcactcagtgtccgagtctcctggacagtcagtcaccatctcctgcactggaaccagcagtgatgttggtggttataattatgtctcctggtaccaacagcacccaggcaaagcccccaaattcataatctatgatgtcagtaagcggccctcaggggtccctgatcgcttctctggctccaagtctggcaacacggcctccctgaccatctctgggctccaggctgaggatgaggctgattattactgctgctcatatgcaggcagcactttcggagtcttcggaactgggaccagggtcaccgtcttag

SEQ ID NO: 10835 - DNA, 322 bp, Homo sapiens
gacatccagatgacccagtctccttccaccctgtctgcatctgtaggagacagagtcaccatcacttgccgggccagtcagagtattagtaactggttggcctggtatcaacagaaaccagggaaagcccctaagctcctgatctataaggcgtctagtttagaaagtggggtcccatcaaggttcagcggcagtggatctgggacagaattcactctcaccatcagcagcctgcagcctgatgattttgcaacttattactgccaacagtataatagttattctctgacgttcggccaagggaccaaggtggaaatcaaac

SEQ ID NO: 10836 - DNA, 334 bp, Homo sapiens
cagtctgtgctgacgcagccgccctcagtgtctggggccccagggcagagggtcaccatctcctgtactgggaacagctccaacatcggggcaggttatgctgtgcactggtaccagcagcttccaggaagagcccccaaactcctcatctatggtaacagccatcggccctcaggggtccctgaccgatactctggctccaagtctggcacctcagcctccctggccatcactgggctccagtctgaggatgaggctgattattactgccagtcctatgacagcagcctgagtggtgtggtattcggcggagggaccaagctgaccgtcctag

SEQ ID NO: 10837 - DNA, 331 bp, Homo sapiens
cagtctgccctgactcagcctgcctccgtgtctgggtctcctggacagtcgatcaccatctcctgcactggaaccagcagtgacgttggtggttataactatgtctcctggtaccaacagcacccaggcaaagcccccaaactcatgatttatgatgtcagtaatcggccctcaggggtttctaatcgcttctctggctccaagtctggcaacacggcctccctgaccatctctgggctccaggctgaggacgaggctgattattactgcagctcatatacaagcagcagccccgtggtattcggcggagggaccaagctgaccgtcctag

SEQ ID NO: 10838 - DNA, 331 bp, Homo sapiens
cagtctgtgctgacgcagccgccctcagtgtctggggccccagggcagagggtcaccatctcctgcactgggagcagctccaacatcggggcaggttatgatgtacactggtaccagcagcttccaggaacagcccccaaactcctcatctatggtaacagcaatcggccctcaggggtccctgaccgattctctggctccaagtctggcacctcagcctccctggccatcactgggctccaggctgaggatgaggctgattattactgccagtcctatgacagcagcctgagtggtgtgttcggcggagggaccaagctgaccgtcctag

SEQ ID NO: 10839 - DNA, 325 bp, Homo sapiens
gacatccagatgacccagtctccatcttccgtgtctgcatctgtaggagacagagtcaccatcacttgtcgggcgagtcagggtattagcagctggttagcctggtatcagcagaaaccagggaaagcccctaagctcctgatctatgctgcatccagtttgcacagtggggtcccatcaaggttcagcggcagtggatctgggacagatttcactctcaccatcagcagcctgcagcctgaagattttgcaacttactattgtcaacaggctaacagtttcctcgcgctcactttcggcggagggaccaaggtggagatcaaac

SEQ ID NO: 10840 - DNA, 325 bp, Homo sapiens; identical to SEQ ID NO: 903

SEQ ID NO: 10841 - DNA, 337 bp, Homo sapiens
gatattgtgatgactcagtctccactctccctgcccgtcacccctggagagccggcctccatctcctgcaggtctagtcagaacctcctgcatagtactggatacaactatttggattggtacctgcagaagccagggcagtctccacagctcctgatctatttgggttctaatcgggcctccggggtccctgacaggttcagtggcagtggatcaggcacagattttacactgaaaatcagcagagtggaggctgaggatgttggggtttattactgcatgcaagctctacaaactccattcactttcggccctgggaccaaagtggatatcaaac

SEQ ID NO: 10842 - DNA, 322 bp, Homo sapiens
gacatccagatgacccagtctccttccaccctgtctgcatctgtcggacacagagtcaccatcacttgccgggccagtcagagtattagtggctggttggcctggtatcagcagaaaccagggaaagcccctaagctcctgatctataaggcgtctagtttagaaagtggggtcccatcaaggttcagcggcagtggatctgggacagaattcactctcaccatcagcagcctgcagcctgatgattttgcaacttattactgccaacagtataatagttatcggtggacgttcggccaagggaccaaggtggaaatcaaac

SEQ ID NO: 10843 - DNA, 331 bp, Homo sapiens
cagtctgccctgactcagcctgcctccgtgtctgggtctcctggacagtcgatcaccatctcctgcactggaaccagcagtgatgttgggagttataaccttgtctcctggtaccaacagcccccaggcaaagcccccaaactcatgatttatgaggtcagtcagcggccctcaggggtttctaatcgcttctctggctccaagtctggcaacacggcctccctgacaatctctgggctccaggctgaggacgaggctgattattactgctgctcatatgcaggtagtggcactgtggtattcggcggagggaccaagctgaccgtcctag

SEQ ID NO: 10844 - DNA, 331 bp, Homo sapiens
aattttatgctgactcagccccactctgtgtcggagtctccggggaagacggtaaccatctcctgcacccgcagcagtggcagcattgccagcaactatgtgcagtggtaccagcagcgcccgggcagttgccccaccactgtgatctatgaggataaccaaagaccctctggggtccctgatcggttctctggctccatcgacagctcctccaactctgcctccctcaccatctctggactgaagactgaggacgaggctgactactactgtcagtcttatgatagcagcatcgtggtattcggcggagggaccaagctgaccgtcctag

SEQ ID NO: 10845 - DNA, 319 bp, Homo sapiens
tcctatgagctgactcagccaccctcagtgtccgtgtccccaggacagacagccagcatcacctgctctgcagataagttgggggataaatatgcttcctggtatcagcagaagccaggccagtcccctgtgctggtcatctatcaagataacaagcggccctcagggatccctgagcgattctctggctccaactctgggaacacagccactctgaccatcagcgggacccaggctatggatgagggtgactattactgtcaggcgtgggacagcagctccgtggtattcggcggagggaccaagctgaccgtcctag

SEQ ID NO: 10846 - DNA, 325 bp, Homo sapiens
tcctatgagctgacacagccaccctcggtgtcagtgtccccaggacaaacggccaggatcacctgctctggagatgcattgccaaaaaaatatgcttattggtaccagcagaagtcaggccaggcccctgtgctggtcatctatgaggacagcaaacgaccctccgggatccctgagagattctctggctccagctcagggacaatggccaccttgactatcagtggggcccaggtggaggatgaagctgactactactgttactcaaccgacagcagtggtaatcattgggtgttcggcggagggaccaagctgaccgtcctag

SEQ ID NO: 10847 - DNA, 319 bp, Homo sapiens
gacatccagatgacccagtctccatcctccctgtctgcatctgtaggagacagagtcaccatcacttgtcaggcgagtcaggacattagcaagtatttaaattggtatcagcagaaaccagggagagcccctaagctcctgatctacgatgcatccaatttgagagcaggggtcccatcaaggttcagtggaagtggatctgggacagattttactttcaccatcagcagcctgcagcctgaagatattgcaacatattactgtcaacagtatgataatctcctcactttcggcggagggaccaaggtggagatcaaac

SEQ ID NO: 10848 - DNA, 340 bp, Homo sapiens
gacctcgtgatgacccagtctccagactccctggctgtgtctctgggcgagagggccaccctcaactgcaagtccagccagactgttttatccagctcctacaataagaactacttagcttggtaccagcagaaaccaggacagcctcctaagctgctcatttactgggcatctacccggcaatccggggtccctgaccgattcagtggcagcgggtctgggacagatttcactctcaccatcagcagcctgcaggctgaagatgtggcagtttattactgtcagcaatattttagtcctccgtggacgttcggccaagggaccaaggtggaaatcaaac

SEQ ID NO: 10849 - DNA, 322 bp, Homo sapiens
gacatccagatgacccagtctccttccaccctgtctgcatctgtaggagacagagtcaccatcacttgccgggccagtcagagtattagtagctggttggcctggtatcagcagaaaccagggaaagcccctaagctcctgatctataaggcgtctagtttagaaagtggggtcccatcaaggttcagcggcagtggatctgggacagaattcactctcaccatcagcagcctgcagcctgatgattttgcaacttattactgccaacagtataatagttattctcggacttttggccaggggaccaagctggagatcaaac

SEQ ID NO: 10850 - DNA, 319 bp, Homo sapiens
gacatccagatgacccagtctccatcctccctgtctgcatctgtaggagacagagtcaccatcacttgccaggcgagtcaggacattaccaactatttaaattggtatcagcagaaaccagggaaagcccctaaactcctgatccacgatgtatccaacttggaaataggggtcccatcaaggttcagtggaagtggatctgggacagattttactctcaccatcagcggcctgcagcctgaagatattgcaacatattactgtcaacagtatgataatctcctctctttcggcggagggaccaaggtggagatcaaac

SEQ ID NO: 10851 - DNA, 331 bp, Homo sapiens
caggcagggctgactcagccaccctcggtgtccaagggcttgagacagaccgccacactcacctgcactgggaacagcaacaatgttggcaaccaaggagcagcttggctgcagcagcaccagggccaccctcccaaactcctatcctacaggaataacgaccggccctcagggatctcagagagattatctgcatccaggtcaggaaacacagcctccctgaccattactggactccagcctgaggacgaggctgactattactgctcagcatgggacagcagcctcagtggttgggtgttcggcggagggaccaagctgaccgtcctag

SEQ ID NO: 10852 - DNA, 322 bp, Homo sapiens
gaaattgtgttgacacagtctccagccaccctgtctttgtctccaggggaaagagccaccctctcctgcagggccagtcagagtgttagcagctacttagcctggtaccaacagagacctggccaggctcccaggctcctcatctatgatgcatccaacagggccactggcatcccagccaggttcagtggcagtgggtctgggacagacttcactctcaccatcagcagactggagcctgaagattttgcagtgtattactgtcagcagtatggtagctcaccgtggacgttcggccaagggaccaaggtggaaatcaaac

SEQ ID NO: 10853 - DNA, 322 bp, Homo sapiens
gacatccagatgacccagtctccatcctcactgtctgcatctgtaggagacagagtcaccatcacttgtcgggcgagtcagggcattagcaattatttagcctggtttcagcagaaaccagggaaagcccctaagtccctgatctatgctgcatccagtttgcaaagtggggtcccatcaaagttcagcggcagtggatctgggacagatttcactctcaccatcagcagcctgcagcctgaagattttgcaacttattactgccaacagtataatagttaccccctcactttcggcggagggaccaaggtggagatcaaac

SEQ ID NO: 10854 - DNA, 322 bp, Homo sapiens
tcctatgagctgactcagccaccctcagtgtccgtgtccccaggacagatagccagcatcacctgctctggagataaattgggggataaatatgcttcttggtatcagcagaagccaggccagtcccctgcgctggtcatctatcaagatagcaagcggccttcagggatccctgagcgattctctggctccaactctgggaacacagccactctgaccatcagcgggacccaggctctggatgaggctgactattactgtcaggcgtgggacagcaggacttctgtggtattcggcggagggaccaagctgaccgtcctag

SEQ ID NO: 10855 - DNA, 322 bp, Homo sapiens; identical to SEQ ID NO: 4679

SEQ ID NO: 10856 - DNA, 319 bp, Homo sapiens
gaaatagtgatgacgcagtctccagccaccctgtctgtgtctccaggggaaagagtcaccctctcctgcagggccagtcagagtgttagcagcaacttagcctggtaccagcaaaaacctggccaggctcccaggctcctcatctatggtgcatccaccagggccactggtatcccagccaggttcagtggctctgggtctgggacagagttcactctcaccatcagcagcctgcagtctgaagattttgcagtctattactgtcagcagtataataattggcacacttttggccaggggaccaagctggagatcaaac

SEQ ID NO: 10857 - DNA, 328 bp, Homo sapiens
gacatccagatgacccagtctccatcctccctgtctgcatctgtaggagacagagtcaccatcacttgccaggcgagtcaggacattagcaactatttaaattggtatcagcagaaaccagggaaagcccctaagctcctgatctacgatgcatccaatttggaaacaggggtcccatcaaggttcagtggaagtggatctgggacagattttactttcaccatcagcagcctgcagcctgaagatattgcaacatattactgtcaacactatgatgatctccctccgaggctcactttcggcggagggaccaaggtggagatcaaac

SEQ ID NO: 10858 - DNA, 322 bp, Homo sapiens; identical to SEQ ID NO: 10543

SEQ ID NO: 10859 - DNA, 331 bp, Homo sapiens
cagtctgccctgactcagcctgcctccgtgtctggatctcctggacagtcgatcaccatctcctgcactggaaccagcagtgacgttggtggttataactatgtctcctggtaccaacagcacccaggcaaagcccccaaactcatgatttatgatgtcagtaatcggccctcaggggtttctaatcgcttctctggctccaagtctggcaacacggcctccctgaccatctctgggctccagggtgaggacgaggctgattattactgctgctcatatacaagcatcagcacttgggtgttcggcggagggaccaagctggccgtcctag

SEQ ID NO: 10860 - DNA, 331 bp, Homo sapiens
cagtctgccctgactcagccagcctccgtgtctgggtctcctggacagtcgatcaccatctcctgcactggaaccagcagtgatgttgggagttataaccttgtctcctggtaccagcagcacccaggcaaagcccccaaactcatgatttatgaggtctctaagcggccctcgggggtttcttctcgcttctctggctccaagtctgccaacacggcctccctgacaatctctgggctcctggctgaggacgaggctgattactactgctcctcatttgcaattattaccactttggtcttcggcggggggaccaagttgaccgtcctag

SEQ ID NO: 10861 - DNA, 331 bp, Homo sapiens
cagtctgccctgactcagcctgcctccgtgtctgggtctcctggacagtcgatcaccatctcctgcactggaaccagcagtgatgttgggagttataaccttgtctcctggtaccaacagcacccaggcaaagcccccaaagtcatgatttatgaggtcagtaagcggccctcaggggtttctaatcgcttctctggctccaaggctggcaacacggcctccctgacaatctctgggctccaggctgaggacgaggctgattattactgctgctcatatggaggtagtaggaattgggtgttcggcggagggaccaagctgaccgtcctag

SEQ ID NO: 10862 - DNA, 319 bp, Homo sapiens
gacatccagatgacccagtctccttccaccctgtctgcatctgtaggagacagagtcaccatcacttgccgggccagtcagagtattagtagctggttggcctggtatcagcagaaaccagggaaagcccctaagctcctgatctataaggcatctagtttagaaagtggggtcccatcaaggttcagcggcagtggatctgggacagaattcactctcaccatcagcagcctgcagcctgatgattttgcaacttattactgccaacagtataatagttattggacttttggccaggggaccaagctggagatcaaac

SEQ ID NO: 10863 - DNA, 322 bp, Homo sapiens
tcttctgagctgactcaggaccctgctgtgtctgtggccttgggacagacagtcaggatcacatgccaaggagacagcctcagaagccattatgcaacctggtaccagcagaagacaggacaggcccctgtacttgtcttctatggcaaaaataaccggccctcagggatcccagaccgattctctggctccagctcaggaaacacagcttccttgaccatcactggggctcaggcggaagatgagactgactattactgtaactcccgggacagcagtggtaacctcgttttcggcggagggaccaagctgaccgtcctag

SEQ ID NO: 10864 - DNA, 325 bp, Homo sapiens
tcctatgagctgacacaaccaccctcggtgtcagtgtccccaggacaaacggccaggatcacctgctctggagatgcattgccaaaaaaatatgcttattggtaccagcagaagtcaggccaggcccctgtgctggtcatctatgaggactacaaacgaccctccgggatccctgagagattctctggctccagctcagggacaatggccaccttgactatcagtggggcccaggtggaggatgaagctgactactactgttactcaacagacagcggtggtaatcatagggtcttcggaactgggaccaaggtcaccgtcctag

SEQ ID NO: 10865 - DNA, 325 bp, Homo sapiens
gacatccagatgacccagtctccatcctccctgtctgcatctgtaggagacagagtcaccatcacttgccgggcaagtcagagcattcgcagctatttaaattggtatcagcagaaaccagggaaagcccctaagctcctgatctatgctgcatccagtttgcaaagtggggtcccatcaaggttcagtggcagtggatctgggacagatttcactctcaccatcagcagtctgcaacctgaagattttgcaacttactgctgtcaacagagttacagtacccccccgtggacgttcggccaagggaccaaggtggaaatcaaac

SEQ ID NO: 10866 - DNA, 322 bp, Homo sapiens
tcctatgagctgacacagccaccctcggtgtcagtgtccccaggacagacggccaggatcacctgctctggagatgcattgccacagcaatatgctcattggtaccagcagaagccaggccaggcccctgtgttggtgatatataaagacactgagaggccctcagggatccctgagcgattctctggctccagctcagggacaacagtcacgttgaccatcagtggagtccaggcagaagacgaggctgactattactgtcaatcagcagtcagcagtggtaccagggtattcggcggagggaccaagctgaccgtcctag

SEQ ID NO: 10867 - DNA, 328 bp, Homo sapiens
gaaattgtgttgacacagtctccagccaccctgtctttgtctccaggggaaagagccaccctctcctgcagggccagtcagagtgttagcagctacttagcctggtaccaacagaaacctggccaggctcccaggctcctcatctatgatgcatccaacagggccactggcatcccagccaggttcagtggcagtgggtctgggacagacttcactctcaccatcagcagcctagagcctgaagattttgcagtttattactgtcagcagcgtagcaactggcctccggttctcactttcggcggagggaccaaggtggagatcaaac

SEQ ID NO: 10868 - DNA, 322 bp, Homo sapiens
gacatccagatgacccagtctccatcctccctgtctgcatctgtaggagacagagtcaccatcacttgccaggcgagtcaggacattaggaactatttaaattggtatcagcagaaaccagggaaggcccctaagctcctgatctacgatgcatccaatttggaaacaggggtcccatcaaggttcagtggaagtggatctgggacagattttactttcatcatcagcagcctgcagcctgaagatattgcaacatattactgtcaacagtatgataatctccccctcactttcggccctgggaccaaagtggatatcaaac

SEQ ID NO: 10869 - DNA, 340 bp, Homo sapiens; identical to SEQ ID NO: 3951

SEQ ID NO: 10870 - DNA, 325 bp, Homo sapiens
tcctatgtgctgactcagccaccctcggtgtcagtggccccaggaaagacggccaggattacctgtgggggaaacaacattggaagtaaaagtgtgcactggtaccagcagaagccaggccaggcccctgtgctggtcgtctatgataatagcgaccggccctcagggatccctgagcgattctctggctccaactctgggaacacggccaccctgaccatcagcagggtcgaagccggggatgaggccgactattactgtcaggtgtgggatagtagtagtgatcatagagtgttcggcggagggaccaagctgaccgtcctag

SEQ ID NO: 10871 - DNA, 319 bp, Homo sapiens
tcctatgagctgactcagccaccctcagtgtccgtgtccccaggacagacagccagcatcacctgctctggagataaattgggggataaatatgcttgctggtatcagcagaagccaggccagtcccctatactgatcatctatcaagataccaagcggccctcagggatccctgagcgattctctggctccaactctgggaacacagccactctgaccatcagcgggacccaggctatggatgaggctgactattactgtcaggcgtgggacagcggcacgggggtcttcggaactgggaccaaggtcaccgtcctag

SEQ ID NO: 10872 - DNA, 322 bp, Homo sapiens
gacgtccagatgacccagtctccatcctccctgtctgcatctgtaggagacagagtcaccatcacttgccgggcaagtcagggcattagaaatgatttaggctggtatcagcagaaaccagggaaagcccctaagcgcctgatctatgctgcatccagtttgcaaagtggggtcccatcaaggttcagcggcagtggatctgggacagaattcactctcacaatcagcagcctgcagcctgaagattttgcaacttattactgtctacagcataatagttacccgctcactttcggcggagggaccaaggtggagatcaaac

SEQ ID NO: 10873 - DNA, 322 bp, Homo sapiens
gacgtccagatgacccagtctccatcctccctgtctgcatctgtaggagacagagtcaccatcacttgccgggcaagtcagggcattagaaatgatttaggctggtatcagcagaaaccagggaaagcccctaagcgcctgatctatgctgcatccagtttgcaaagtggggtcccatcaaggttcagcggcagtggatctgggacagaattcactctcacaatcagcagcctgcagcctgaagattttgcaacttattactgtctacagcataatagttacccgctcactttcggcggagggaccaaggtggaaatcaaac

SEQ ID NO: 10874 - DNA, 331 bp, Homo sapiens
cagtctgccctgactcagcctccctccgtgtccgggtctcctggacagtcagtcaccatctcctgcactggaaccagcagtgacgttggtaataataaccgtgtctcctggtaccagcagcccccaggcacagcccccaaactcatgatttatgaggtcagtaatcggccctcaggggtccctgatcgcttctctgggtccaagtctggcaacacggcctccctgaccatctctgggctccaggctgaggacgaggctgattattactgcagctcatatacaagcagcagcagtgtggtattcggcggagggaccaagctgaccgtcctag

SEQ ID NO: 10875 - DNA, 329 bp, Homo sapiens
cagtctgccctgactcagcctgcctccgtgtctgggtctcctggacagtcgatcaccatctcctgcactggaaccagcagtgacgttggtggctataactatgtctcctggtaccaacagtatttaggcaaagtccccaaactcctgatttatgatgtcagtaatcggccctcaggggtttctaatcgcttctctggctccaagtctggcaacacggcctccctgaccatctctgggctccaggctgaggacgaggctgattattactgcagctcatatacaagcagcagcacttatgtcttcggaactgggacccaggtcaccgtcct

SEQ ID NO: 10876 - DNA, 328 bp, Homo sapiens
cagtctgccctgactcagcctgcctccgtgtctgggtctcctggacagtcgatcaccatctcctgcactggaaccagcagtgacgttggtggttataactatgtctcctggtaccaacagcacccaggcaaagcccccaaactcatgatttatgatgtcagtaatcggccctcaggggtttctaatcgcttctctggctccaagtctggcaacacggcctccctgaccatctctgggctccaggctgaggacgaggctgattattactgcagctcatatacaagcagcagcacggtgttcggcggagggaccaagctgaccgtcctag

SEQ ID NO: 10877 - DNA, 331 bp, Homo sapiens
cagtctgccctgactcagcctccctccgtgtccgggtctcctggacagtcagtcaccatctcctgcactggaaccagcagtgacattggtacttataaccgtgtctcctggtaccaacagcccccaggcacagcccccaaactcatgatttatgaggtcagtaatcggccctcaggggtccctgatcgcttctctgggtccaagtctggcaacacggcctccctgaccatctctgggctccaggctgaggacgaggctgcttattactgcagctcatatacaagcagcagcactgtggtcttcggcggagggaccaagctgaccgtcctag

SEQ ID NO: 10878 - DNA, 325 bp, Homo sapiens
gaaattgtgttgacgcagtctccaggcaccctgtctttgtctccaggggaaagagccaccctctcctgcagggccagtcagagtgttagcagcagctacttagcctggtaccagcagaaacctggccaggctcccaggctcctcatctatggtgcatccagcagggccactggcatcccagacaggttcagtggcagtgggtctgggacagacttcactctcaccatcagcagactggagcctgaagattttgcagtgtattactgtcagcagtatggtagctcccctctcactttcggcggagggaccaaggtggagatcaaac

SEQ ID NO: 10879 - DNA, 316 bp, Homo sapiens
gaaattgtgttgacacagtctccagccaccctgtctttgtctccaggggaaagagccaccctctcctgcagggccagtcagagtgttaggagctacttagcctggtaccaacagaaacctggccaggctcccaggctcctcatctatgatgcatccaacagggccactggcatcccagccaggttcagtggcagtgggtctgggacagacttcactctcaccatcagcagcctagagcctgaagattttgcagtttattactgtcagcagcgtagcagcgggcggacgttcggccaagggaccaaggtggaaatca

SEQ ID NO: 10880 - DNA, 319 bp, Homo sapiens
gaaattgtgttgacacagtctccagccaccctgtctttgtctccaggggaaagagccaccctctcctgcagggccagtcagaatgttaggaactacttagcctggtaccaacagaaacctggccaggctcccaggctcctcatctatgatgcatccaacagggccactggcatcccagccaggttcagtggcagtgggtctgggacagacttcactctcaccatcagcagcctagagcctgaagattttgcagtttattactgtcagcagcgtagcagcgggcggaagttcggccaagggaccaaggtggaaatcaaac

SEQ ID NO: 10881 - DNA, 322 bp, Homo sapiens; identical to SEQ ID NO: 4737

SEQ ID NO: 10882 - DNA, 334 bp, Homo sapiens
cagtctgccctgactcagcctgcctccgtgtctgggtctcctggacagtcgatcaccatctcctgcactggaaccagcagtgacgttggtggttataactatgtctcctggtaccaacaacacccaggcaaagcccccaaactcatgatttatgatgtcagtaatcggccctcaggggtttctaatcgcttctctggctccaagtctggcaacacggcctccctgaccatctctggcctccaggctgaggacgaggctgattattactgcagctcatatataagtaccagcactttttatgtcttcggaactgggaccaaggtcaccgtcctag

SEQ ID NO: 10883 - DNA, 322 bp, Homo sapiens; identical to SEQ ID NO: 3870

SEQ ID NO: 10884 - DNA, 332 bp, Homo sapiens
cagtctgtgctgactcagccaccctcagcgtctgggacccccgggcagagggtcaccatctcttgttctggaagcagctccaacatcggaagtaattatgtatactggtaccagcagctcccaggaacggcccccaaactcctcatctataggaataatcagcggccctcaggggtccctgaccgattctctggctccaagtctggcacctcagcctccctggccatcagtgggctccggtccgaggatgaggctgattattactgtgcagcatgggatgacagcctgagtggtccgggtgttcggcggagggaccaagctgaccgtcctag

SEQ ID NO: 10885 - DNA, 340 bp, Homo sapiens
gacatcgtgatgacccagtcaccagactccctggctgtgtctctgggcgagagggccaccatcaactgcaagtccagccagagtgttttaaacaactcaaacaacaagaactacttggcttggttccagcagaaaccaggacagcctcctaacctgctcttttactgggcatctacccgggaatccggagttcctgaccgactcagtgccagcgggtccgggacagacttcactctcaccatcagcagcctgcaggctgaggatgtggcagcttattactgtcaacaatattatagtattccgtggacgttcggccaagggaccaaggtggagatcaaac

SEQ ID NO: 10886 - DNA, 334 bp, Homo sapiens
cagtctgtgttgacgcagccgccctcagtgtctgcggccccaggacagaaggtcaccatctcctgctctggaagcacctccaacattgggattaatcatgtatcctggtaccagcagctcccaggaacagcccccaaactcctcatttatgacaatagtaagcgaccctcagggattcctgaccgattctctggctccaagtctggcacgtcagccaccctgggcatcaccggactcctgactggggacgaggccgattattactgcggaacatgggatagcagcctgagtgttttttgggcgttcggcggagggaccaagctgaccgtcctag

SEQ ID NO: 10887 - DNA, 337 bp, Homo sapiens
cagcctgtgctgactcaatcatcctctgcctctgcttccctgggatcctcggtcaagctcacctgcactctgagcagtgggcacagtagttacatcatcgcatggcatcagcagcagccagggaaggcccctcggtacttgatgaaggttgaaggtagtggaaggtacaacaaggggagcggagtacctgatcgcttctcaggctccagctctggggctgaccgctacctcaccatctccaacctcctgtttgaggatgaggctgattattactgtgagacctgggacagtgatactcgggtggtcttcggcggagggaccaagctgaccgtcctag

SEQ ID NO: 10888 - DNA, 325 bp, Homo sapiens
gccatccggatgacccagtctccatcctcattctctgcatctacaggagacagagtcaccatcacttgtcgggcgagtcagggtattagcagttatttagcctggtatcagcaaaaaccagggaaagcccctaagctcctgatctatgctgcatccactttgcaaagtggggtcccatcaaggttcagcggcagtggatctgggacagatttcactctcaccatcagctgcctgcagtctgaagattttgcaacttattactgtcaacagtattatagttaccccccattcactttcggccctgggaccaaagtggatatcaaac

SEQ ID NO: 10889 - DNA, 313 bp, Homo sapiens
gaaattgtgttgacgcagtctccaggcaccctgtctttgtctccaggggaaagagccaccctctcctgcagggccagtcagagtgttagcagcagctacttagcctggtaccagcagaaacctggccaggctcccaggctcctcatctatggtgcatccagcagggccactggcatcccagacaggttcagtggcagtgggtctgggacagacttcagtctcaccatcagcagactggagcctgaagattttgcagtgtattactgtcagtaccaggacacttttggccaggggaccaagctggagatcaaac

SEQ ID NO: 10890 - DNA, 322 bp, Homo sapiens
gaaatagtgatgacgcagtctccagccaccctgtctgtgtctccaggggaaagagccaccctctcctgcagggccagtcagagtgttagcagcaacttagcctggtaccagcagaaacctggccaggctcccaggctcctcatctatggtgcatccaccagggccactggtatcccagccaggttcagtggcagtgggtctgggacagagttcactctcaccatcagcagcctgcagtctgaagattttgcagtttattactgtcagcagtataataactggcctcccccgttcggccaagggaccaaggtggaaatcaaac

SEQ ID NO: 10891 - DNA, 331 bp, Homo sapiens
caggctgtggtgactcaggagccctcactgactgtgtccccaggagggacagtcactctcacctgtggctccagcactggagctgtcaccagtggtcattatccctactggttccagcagaagcctggccaagcccccaggacactgatttatgatacagccaacaaacactcgtggacacctgcccggttctcaggctccctccttgggggcaaagctgccctgaccctttcgggtgcgcagcctgaggatgaggctgagtattactgcttgctctcctatagtggtgattatatggtattcggcggagggaccaagctgaccgtcctag

SEQ ID NO: 10892 - DNA, 322 bp, Homo sapiens; identical to SEQ ID NO: 4679

SEQ ID NO: 10893 - DNA, 328 bp, Homo sapiens
caggctgtggtgactcaggagccctcactgactgtgtccccaggagggacagtcactctcacctgtggctccagcactggagctgtctccagtggtcattatccctactggttccagcagaagcctggccaagcccccaggacactgatttttgatacaacctacaaacactcctggacacctgcccggttctcaggctccctccttgggggcaaagctgccctgaccctttcgggtgcgcagcctgaagatgaggctgagtattactgcttgctctcctatagtgggccgtgggtgttcggcggagggaccaagctgaccgtcctag

SEQ ID NO: 10894 - DNA, 334 bp, Homo sapiens
cagtctgtgttgacgcagccgccctcagtgtctgcggccccaggacagaaggtcaccatctcctgctctggaagcagctccaacattggaaataattatgtatcctggtaccagcagctcccaggaacagcccccaaactcctcatttatgacaataataagcgaccctcagggattcctgaccgattctctggctccaagtctggcacgtcagccaccctgggcatcaccggactccagactggggacgaggccgattattactgcggaacatgggatagcagcctgagtgctggaggggtattcggcggagggaccaagctgaccgtcctag

SEQ ID NO: 10895 - DNA, 328 bp, Homo sapiens
gaaatagtgatgacgcagtctccagccaccctgtctgtgtctccaggggaaagagccaccctctcttgcagggccagtcagagtgttagcagcaacttagcctggtaccagcagaaacctggccaggctcccaggctcctcatctatggtgcttccaccagggccactggtatcccagccaggttcactggcagtgggtctgggacagagttcactctcaccatcagcagcctgcagtctgaagattttgcagtttattactgtcagcagtataataactggcctccgggtaggacgttcggccaagggaccaaggtggaaatcaaac

SEQ ID NO: 10896 - DNA, 325 bp, Homo sapiens
gaaattgtgttgacgcagtctccaggcaccctgtctttgtctccaggggaaagagccaccctctcctgcagggccagtcagagtgttagcagcagctacttagcctggtaccagcagaaacctggccaggctcccaggctcctcatctatggtgcatccagcagggccactggcatcccagacaggttcagtggcagtgggtctgggacagacttcactctcaccatcagcagactggagcctgaagattttgcagtgtattactgtcagcagtatggtagctcgccattcactttcggccctgggaccaaagtggatatcaaac

SEQ ID NO: 10897 - DNA, 331 bp, Homo sapiens
cagactgtggtgacccaggagccatcgttctcagtgtcccctggagggacagtcacactcacttgtggcttgagctctggctcagtctctgattattattaccccgcctggtaccagcagaccccaggccaggctccacgcacgctcatccacagcacaaacattcgcccttctggagtccctgatcgcttctctggctccatccttgagaacaaagctgccctcaccatcacgggggcccaggcagatgatgagtctgattattattgtgtcctgtatatgggtagtggcatttcggtgttcggcggagggaccaaggtgaccgtcctag

SEQ ID NO: 10898 - DNA, 322 bp, Homo sapiens; identical to SEQ ID NO: 927

SEQ ID NO: 10899 - DNA, 322 bp, Homo sapiens
gccatccggatgacccagtctccatcctcattctctgcatctacaggagacagagtcaccatcacttgtcgggcgagtcagggtattagcagttatttagcctggtatcagcaaaaaccagggaaagcccctaagctcctgatctatgctgcatccactttgcaaagtggggtcccatcaaggttcagcggcagtggatctgggacagatttcactctcaccatcagctgcctgcagtctgaagattttgcaacttattactgtcaacagtattatagttaccctccgacgttcggccaagggaccaaggtggaaatcaaac

SEQ ID NO: 10900 - DNA, 322 bp, Homo sapiens
gacatccagttgacccagtctccatccttcctgtctgcatctgtaggagacagagtcaccatcacttgccgggccagtcagggcattagcagttatttagcctggtatcagcaaaaaccagggaaagcccctaagctcctgatctatgctgcatccgctttgcaaactggggtcccatcaaggttcagcggcggtggatctgggacagaattcactctcacaatcagcagcctgcagcctgaagattttgcaacttattactgtcaacagcttaatagttaccctcggactttcggcggagggaccaaggtggagatcaaac

SEQ ID NO: 10901 - DNA, 319 bp, Homo sapiens
tcctatgagctggctcagccaccctcagtgtccgtgtccccaggacagacagccagcatcacctgctctggagataaattggggaataaatatgcttgctggtatcagcagaagccaggccagtcccctgtgctggtcatctatcaagataccaagcggccctcagggatccctgagcgattctctggctccaactctgggaacacagccactctgaccatcagcgggacccaggctatggatgaggctgactattactgtcaggcgtgggacagcagcaatgtggtattcggcggagggaccaagctgaccgtcctag

SEQ ID NO: 10902 - DNA, 322 bp, Homo sapiens
gacatccagatgacccagtctccttccaccctgtctgcatctgttggagacagagtcaccatcacttgccaggcgagtcaggacattagcaactctttaaattggtatcaccagaaaccaggtaaagcccctaacctcctgatctacgatgcatccaatttggaaacaggggtcccatcaaggttcagtggaagtggatctgggacagattttactttcaccatcagcagcctgcagcctgaagatattgcaacatattactgtcaacagtatgatagtctccccctcactttcggcggagggaccaaggtggacatcaaac

SEQ ID NO: 10903 - DNA, 325 bp, Homo sapiens; identical to SEQ ID NO: 6056

SEQ ID NO: 10904 - DNA, 325 bp, Homo sapiens
gaaattgtgttgacgcagtctccaggcaccctgtctttgtctccaggggaaagagccaccctctcctgcagggccagtcagagtgttaccagcagctacttagcctggtaccagcagaaacgtggccaggctcccaggctcctcatgtatggtgcatccagcagggccactggcatcccagacaggttcagtggcagtgggtctgggacagagttcactctcatcatcagcagactggagcctgaagatttcgcagtgtattactgtcagcagtatggtagctcacccctcactttcggcggagggaccaaggtggagatccaac

SEQ ID NO: 10905 - DNA, 325 bp, Homo sapiens
gacatccagatgacccagtctccatcctccctgtctgcatctgtaggagacagagtcaccatcacttgccaggcgagtcaggacattagcaactatttaaattggtatcagcagaaaccagggaaagcccctaagctcctgatctacgatgcatccaatttggaaacaggggtcccatcaaggttcagtggaagtggatctgggacagattttactttcaccatcagcagcctgcagcctgaagatattgcaacatattactgtcaacagtatgataatctccctcctcacactttcggccctgggaccaaagtggatatcaaac

SEQ ID NO: 10906 - DNA, 319 bp, Homo sapiens
tcctatgagctgcagcagccaacctcagtgtccgtgtccccaggacagacagccagcatcacctgctctggaggtaaattgggtaatagatatgcttcctggtatcagcagaagccaggccagtcccctgtgttggtcatctatcaagataacaagcggccctcagggatccctgagcgattctctggctccagctctgggaacacagccactctgaccatcagcgggacccaggctatggatgaggctgactattactgtcaggcgtgggacagcagcactgtgatattcggcggagggaccaagctgaccgtcctag

SEQ ID NO: 10907 - DNA, 334 bp, Homo sapiens
gatattgttatgactcagtctccactctccctgcccgtcacccctggagagccggcctccatctcctgcaggtctagtcagagcctcctgcatagtgatggatacaactatttggattggtacctgcagaagccagggcagtctccacagctcctgatctatttgggttctaatcgggcctccggggtccctgacaggttcagtggcagtggatcaggcacagattttacactgaaaatcagcagagtggaggctgaggatgttggggtttattactgcatgcaagctctacaaacttggacgttcggccaagggaccaaggtggaaatcaaac

SEQ ID NO: 10908 - DNA, 322 bp, Homo sapiens
gacatccagttgacccagtctccatccttcctgtctgcatctgtaggagacagagtcaccatcacttgccgggccagtcagggcattagcacttatttagcctggtatcagcaaaaaccagggaaagcccctaacctcctgatctatgctgcatccactttgcaaagtggggtcccatcaaggttcagcggcagtggatctgggacagaattcactctcacaatcagcagcctgcagcctgaagattttgcaacttattactgtcaacaacttaatagttacttattcactttcggccctgggaccaaagtggatatcaaac

SEQ ID NO: 10909 - DNA, 331 bp, Homo sapiens
cagtctgtgctgactcagccaccctcagcgtctgggacccccgggcagagggtcaccatctcttgttctggaagcagctccaacatcggaagtaatgctgtaaactggtaccagcagctcccaggaacggcccccaaattcctcatctatgataataatcagcggccctcaggggtccctgaccgattctctggctccaagtctggcacctcagcctccctggccatcagtgggctccagtctgaggatgaggctgattattactgtgcagcatgggatgacaggctgaatggtgtggtattcggcggagggaccaagctgaccgtcctag

SEQ ID NO: 10910 - DNA, 331 bp, Homo sapiens
cagtctgtgttgacgcagccgccctcagtgtctgcggccccaggacagaaggtcaccatctcctgctctggaagcagctccaacattgggaataattatgtatcctggtaccagcagctcccaggaacagcccccaaactcctcatctatgaaaataataagcgaccctcagggattcctgaccgattctctggctccaagtctggcacgtcagccaccctgggcatcaccggactccagactggggacgaggccgattattactgcggaacatgggatagcagcctgagtgcttgggtgttcggcggagggaccaagctgaccgtcctag

SEQ ID NO: 10911 - DNA, 310 bp, Homo sapiens
gacatccagatgacccagtctccatcctccctgtctgcatctgtaggagacagagtcaccatcacttgccaggcgagtcaggacattagcaactatttaaattggtatcagcagaaaccagggaaagcccctaagctcctgatctacgatgcatccaatttggaaacaggggtcccatcaaggttcagtggaagtggatctgggacagatttgactttcaccatcagcagcctgcagcctgaagatattgcaacatattactgtcaacaccggggcactttcggaggagggaccaaggtggagatcaaac

SEQ ID NO: 10912 - DNA, 322 bp, Homo sapiens; identical to SEQ ID NO: 10763

SEQ ID NO: 10913 - DNA, 331 bp, Homo sapiens; identical to SEQ ID NO: 10368

SEQ ID NO: 10914 - DNA, 325 bp, Homo sapiens
gaaattgtgttgacgcagtctccaggcaccctgtctttgtctccaggggaaagagccaccctctcctgcagggccagtcagagtgttagcagcagctccttagcctggtaccagcagaaacctggccaggctcccaggctcctcatctatggtgcatccagcagggccactggcatcccagacaggttcagtggcagtgggtctgggacagacttcactctcaccatcagcagactggagcctgaagattttgcagtgtattactgtcagcagtatggtagctcacaggggacgttcggccaagggaccaaggtggaaatcaaac

SEQ ID NO: 10915 - DNA, 322 bp, Homo sapiens
gacatccacatgacccagtctccatcctccctgtctgcatctgtaggagacagagtcaccatcacttgccaggcgagtcaggacattaacaactctttaaattggtatcagcagaaaccagggaaagcccctaagctcctcatctacgatgcatccattttggaaacaggggtcccatcaagattcagtggaagtggatctgggacagattttactttcaccatcagcagcctgctgcctgaagatattgcaacattttactgtcaacagtatgataatctccctcccactttcggccaggggaccaagctggagatcaaac

SEQ ID NO: 10916 - DNA, 322 bp, Homo sapiens
gacatccagatgacccagtctccatcctccctgtctgcatctgtaggagacagagtcaccatcacttgccgggcgagtcagggcattagcaattatttagcctggtatcagcagaaaccagggaaagttcctaagctcctgatctatgctgcatccactttgcaatcaggggtcccatctcggttcagtggcagtggatctgggacagatttcactctcaccatcagcagcctgcagcctgaagattttgcaacttattactgccaacagtataatagttattctcggacgttcggccaagggaccaaggtggaaatcaaac

SEQ ID NO: 10917 - DNA, 325 bp, Homo sapiens
tcctatgagctgactcagccaccctcagtgtccgtgtccccaggacagacagccagcatcacctgctctggagataaattgggggataaatatgcttgctggtatcagcagaagccaggccagtcccctgtgctggtcatctatcaagatagcaagcggccctcagggatccctgagcgattctctggctccaactctgggaacacagccactctgaccatcagcgggacccaggctatggatgaggctgactattactgtcaggcgtgggacagcagcactgcctcttacgtcttcggaactgggaccaaggtcaccgtcctag

SEQ ID NO: 10918 - DNA, 319 bp, Homo sapiens
tcctttgaactgactcagccaccctcagtgtccgtgtccccaggacagacagccagcatcacctgctctggagataaattgggtgataaatatgcttgctggtatcagcagaagccaggccagtcccctgttctggtcatctatcaagatagcgagcggccctcagggatccctgagcgattctctggctccaactctgggaacacagccactctgaccatcagcgggaccctgcctgtggatgaggctgactattactgtcaggcgtgggacagccgcactgcggtgttcggcggagggaccaagctgaccgtcctag

SEQ ID NO: 10919 - DNA, 322 bp, Homo sapiens
gacatccagatgacccagtctccatgttctctgtctgcatctgtaggagacagagtcaccatcacttgccgggccagtcagagtattagtaactggttggcctggtatcagcagaaaccagggaaagcccctaagctcctgatctataaggcgtctagtttagaaagtggggtcccatcaaggttcagcggcagtggatctgggacagatttcactctcaccatcagcagcctgcagcctgaagattttgcaacttactattgtcaacaggctaacagtttcccgtggacgttcggccaagggaccaaggtggaaatcaaac

SEQ ID NO: 10920 - DNA, 325 bp, Homo sapiens
gaaatagtgatgacgcagtctccagccaccctgtctgtgtctccaggggaaagagccaccctctcctgcagggccagtcagagtgttagcagcaacttagcctggtaccagcagaaacctggccaggctcccaggctcctcatctatggtgcatccaccagggccactggtatcccagccaggttcagtggcagtgggtctgggtcagagttcactctcaccatcagcagcctgcagtctgaagattttgcagtttatttctgtcagcagtataataactggcctccgtacacttttggccaggggaccaagctggagatcaaac

SEQ ID NO: 10921 - DNA, 325 bp, Homo sapiens
gacatccagatgacccagtctccatcctccctgtctgcatctgtaggagacagagtcaccatcacttgccgggcaagtcagagcattagcagctatttaaattggtatcagcagaaaccagggaaagcccctaagctcctgatctatgctgcatccagtttgcaaagtggggtcccatcaaggttcagtggcagtggatctgggacagatttcactctcaccatcagcagtctgcaacctgaagattttgcaacttactactgtcaacagagttacagtaccccgacgtggacgttcggccaagggaccaaggtggaaatcaaac

SEQ ID NO: 10922 - DNA, 346 bp, Homo sapiens
ctgcctgtgctgactcagcccccgtctgcatctgccttgctgggagcctcgatcaagctcacctgcaccctaagcagtgaacacagcacctacaccatcgaatggtatcaacagagaccagggaggtccccccagtatataatgaagtttaagagtgatggcagccacagcaagggggacgggatccccgatcgcttcatgggctccagttctggggctgaccgctacctcaccttctccaacctccagtctgacgacgaggctgagtatcactgtggagagagccacacgattgatggccaagtcggttatgtcttcggaactgggaccaaggtcaccgtcctag

SEQ ID NO: 10923 - DNA, 322 bp, Homo sapiens; identical to SEQ ID NO: 10676

SEQ ID NO: 10924 - DNA, 334 bp, Homo sapiens
cagtctgtgctgactcagccaccctcagcgtctgggacccccgggcagagggtcaccatctcttgttctggaagcaggtccaacatcggaagtaatactgtgagctggtaccagcagctcccaggaacggcccccaaactgctcatctatagtaataatcaacggccctcaggggtccctgaccgattctctggctccaagtctggcacctcagcctccctggccatcagtgggctccagtctgaggatgaggctgattattactgtgcagcatgggatgacagcctgagtggtcgaggagtcttcggcggagggaccaagctgaccgtcctag

SEQ ID NO: 10925 - DNA, 328 bp, Homo sapiens
gaaattgtgttgacgcagtctccaggcaccctgtctttgtctccaggggaaagagccaccctctcctgcagggccagtcagagtgttagcagcagctacttagcctggtaccagcagaaacctggccaggctcccaggctcctcatctatggtgcatccagcagggccactggcatcccagacaggttcagtggcagtgggtctgggacagacttcactctcaccatcagcagactggagcctgaagattttgcagtgtattactgtcagcagtatggtagctcaccccgggggactttcggccctgggaccaaagtggatatcaaac

SEQ ID NO: 10926 - DNA, 319 bp, Homo sapiens
tcctatgagctgactcagccaccctcagtgtccgtgtccccaggacagacagccagcatcacctgctctggagataaattgggggataaatatacttgctggtatcagcagaaggcaggccagtcccctgtgctggtcatgtatcaagatagcaagcggccctcagggatccctgagcgattctctggctccaactctgggaacacagccactctgaccatcagcgggacccaggctttggatgaagctgactattactgtcaggcgtgggacagcagcacttatgtcttcggaactgggaccaaggtcaccgtcctag

SEQ ID NO: 10927 - DNA, 332 bp, Homo sapiens
cagtctgccctgactcagcctgcctccgtgtctgggtctcctggacagtcgatcaccatctcctgcactggaaccagcagtgacgttggtgattatgactatgtctcctggtaccaacaacacccaggcaaagcccccaaactcatgatttatgatgtcagtaatcggccctcaggggtttctaatcgcttctctggctccaagtctggcaacacggcctccctgaccatctctgggctccaggctgaggacgaggccgattattactgcagctcatttacaagcagcagcgctctcgtggttttcggcggagggaccaagctgaccgtcct

SEQ ID NO: 10928 - DNA, 334 bp, Homo sapiens; identical to SEQ ID NO: 10390

SEQ ID NO: 10929 - DNA, 325 bp, Homo sapiens
tcctatgagctgacacagccaccctcggtgtcagtgtccccaggacaaacggccaggatcacctgctctggagatgcattgccagaaaaatttgcttattggtaccaccagaagtcaggccaggcccctgtggtggtcatgtatgaggacagcaaacgaccctccgggatccctgagagattctctggctccagctcagggacaatggccaccttgactatcagtggggcccaggtggaggatgaaggtgactactactgttactcaacagacagcagtggtaatcattgggtgttcggcggagggaccagggtgaccgtcctag

SEQ ID NO: 10930 - DNA, 325 bp, Homo sapiens
tcctatgagctgacacagccaccctcggtgtcagtgtccccaggacaaacggccaggatcacctgctctggagatgcattgccaaaaaaatatgtttattggtaccagcagaagtcaggccaggcccctgtgctggtcatctatgaggacagcaaacgaccctccgggatccctgagagattctctggctccagctcagggacaatggccaccttgactatcagtggggcccaggtggaggatgaagctgactactactgttactcaacacacagcagtggtaatcatagagtcttcggaactgggaccaaggtcaccgtcctag

SEQ ID NO: 10931 - DNA, 322 bp, Homo sapiens
gaaattgtgttgacgcagtctccaggcaccctgtctttgtctccaggggaaagagccaccctctcctgcagggccagtcagagtgttagcagcagctacttagcctggtaccagcagaaacctggccaggctcccaggctcctcatctatggtgcatccagcagggccactggcatcccagacaggttcagtggcagtgggtctgggacagacttcactctcaccatcagcagactggagcctgaagattttgcagtgtattactgtcagcagtatggtagctctttcactttcggccctgggaccaaagtggatatcaaac

SEQ ID NO: 10932 - DNA, 331 bp, Homo sapiens
cagtctgttctgactcagccaccctcagcgtctgggacccccgggcagagggtcaccatctcttgttctggaagcagctccaacatcggaagtgatgctgtcaggtggtaccagaagctcccgggaacggcccccaaactcctcatctatagtactaatcagcggccctcaggggtccctgaccgattctctggctccaagtctggcacctctgcctccctggccatcagtgggctccagtctgacgatgaggctgattattactgtgcagcatgggatgccagcctgaatggttatgtcttcggaactgggaccaacgtcaccgtcctag

SEQ ID NO: 10933 - DNA, 320 bp, Homo sapiens
gacatccagatgacccagtctccatcctccctgtctgcatctgtaggagacagagtcaccatcacttgccgggcgagtcagggcattagcaattatttagcctggtatcagcagaaaccagggaaacttcctaagctcctgatctatgctgcatccactttgcaatcaggggtcccatctcggttcagtggcagtggatctgggacagatttcactctcaccatcagcagcctgcagcctgaagatgttgcaacttattactgtcaaaagtataacagtgcccctcactttcggcggagggaccaaggtggagatcaaac

SEQ ID NO: 10934 - DNA, 325 bp, Homo sapiens
gaaattgtgttgacacagtctccagccaccctgtctttgtctccaggggaaagagccactctctcctgcagggccagtcagagtgttagtaactatttagcctggtaccaacagaaacctggccaggctcccaggctcctcatctatgatgcatccaacagggccactggcatcccagccaggttcagtggcagtgggtctgggacagacttcactctcaccatcagcagcctagagcctgaagattttgcagtttattactgccaccaacgtagcaactggcctccgctcactttcggcggagggaccaaggtggagatcaaac

SEQ ID NO: 10935 - DNA, 325 bp, Homo sapiens
tcctatgagctgacacagccaccctcggtgtcagtgtccccaggacaaacggccaggatcacctgctctggagatgcattgccaaaaaaatatgcttattggtaccagcagaagtcaggccaggcccctgtgctggtcatctatgaggacaacaaacgaccctccgggatccctgagagattctctggctccagctcagggacaatggccaccttgactatcagtggggcccaggtggaggatgaaggtgactactactgttactcaacagacaccagtggtaatcatagggtgttcggcggagggaccaagctgaccgtcctag

SEQ ID NO: 10936 - DNA, 328 bp, Homo sapiens
gaaattgtgttgacgcagtctccaggcaccctgtctttgtctccaggggaaagagccaccctctcctgcagggccagtcagagtgttagcagcagctacttagcctggtaccagcagaaacctggccaggctcccaggctcctcatctatggtgcatccagcagggccactggcatcccagacaggttcagtggcagtgggtctgggacagacttcactctcaccatcagcagactggagcctgaagattttgcagtgtattactgtcagcagtatggtagctcacctcaattcactttcggccctgggaccaaagtggatatcaaac

SEQ ID NO: 10937 - DNA, 334 bp, Homo sapiens
cagtctgtgctgacgcagccgccctcagtgtctggggccccagggcagagggtcaccatgtcctgcactgggagcagctccaacatcggggcaggttatgatgtatactggtaccagcaggttccaggaacagcccccaaactcctcatctatggtaacatcaatcggccctcaggggtccctgaccgattctctggctccaagtctggcacctcagcctccctggccatcactgggctccaggctgaggatgaggctgattattactgccagtcctatgacagcagcctgagtggttgggtgttcggcggagggaccaagctgaccgtcctag

SEQ ID NO: 10938 - DNA, 331 bp, Homo sapiens
cagtctgtgctgactcagccaccctcagcgtctgggacccccgggcagagggtcaccatctcttgttctggaagcagctccaacatcggaagtaatactgtaaactggtaccagcagctcccacgaacggcccccaaactcctcatctataataataatcagcggccctcaggggtccctgaccgattctctggctccaagtctggcacctcagcctccctggccatcaatgggctccagtctgaggatgaggctgattattactgtgcagcatgggatgacagcctgaatggttgggtgttcggcggagggaccaagctgaccgtcctag

SEQ ID NO: 10939 - DNA, 322 bp, Homo sapiens
gacatccagatgacccagtctccatcctccctgtctgcatctgtaggagacggagtcaccatcacttgccgggcaagtcaggacattagaaatgatttaggctggtatcagcagaaaccagggaaagccccaaagcgcctgatctatgctgcatctagtttgcaaagtggggtcccatcaaggttcagcggcagtggatctgggacagaattcactctcacaatcagcagcctgcagcctgaagattttgcaacttattactgtctacagcataacagttacccgtggacgttcggccaagggaccaaggtggaaatcaaac

SEQ ID NO: 10940 - DNA, 337 bp, Homo sapiens
cagtctgtgctgacgcagccgccctcagtgtctggggccccagggcagagggtcaccatctcctgcactgggagcagctccaacatcggggcaggttatgatgtacactggtaccagcagcttccaggaacagcccccaaactcctcatgtatggtaacagcaatcggccctcaggggtccctgaccgattctctggctccaagtctggcacctcagcctccctggccatcactgggctccaggctgaggatgaggctgattattactgccagtcctatgacagcagcctgagtggtaattatgtcttcggaactgggaccaaggtcaccgtcctag

SEQ ID NO: 10941 - DNA, 325 bp, Homo sapiens
gacatccagatgacccagtctccttccaccctgtctgcatctgtaggagacagagtcactatcacttgccgggccagtcagagtattagtagttggttggcctggtatcagcagaaaccagggaaagcccctaagctcctgatctatagggcgtctagtttagaaagtggggtcccatcaaggttcagcggcagtggatctgggacagaattcactctcaccatcagcagcctgcagtctgatgatttttcaacttattactgccaacagtatattagtttttctccgctcactttcggcggagggaccaaggtggagctcaaac

SEQ ID NO: 10942 - DNA, 319 bp, Homo sapiens
tcctatgagctgactcagccaccctcagtgtccgtgtccccaggacagacagccagcatcacctgctctggagataaattgggggataaatatgcttgctggtatcagcagaagccaggccagtcccctgtgctggtcatctatcaagatactaagcggccctcagggatccctgagcgattctctggctccaactctgggaacacagccactctgaccatcagcgggaccctggctatggatgaggctgactattactgtcagacgtgggacagcagcactggcgtcttcggaactgggaccaaagtcaccgtcctag

SEQ ID NO: 10943 - DNA, 325 bp, Homo sapiens
gaaattgtgttgacgcagtctccaggcaccctgtctttgtctccaggggaaagagccaccctctcctgcagggccagtcagagtgttagcagcagctacttagcctggtaccagcagaaacctggccaggctcccaggctcctcatctatggtgcatccagcagggccactggcatcccagacaggttcagtggcagtgggtctgggacagacttcactctcaccatcagcagactggagcctgcagattttgcagtttattactgtcagcagtgtggtagctcactcatcaccttcggccaagggacacgactggagattaaac

SEQ ID NO: 10944 - DNA, 322 bp, Homo sapiens
gacatccagatgacccagtctccatcctccctgtctgcatctgtaggagacagagtcgccatcacttgccgggcaagtcagagcattagtagctttttaaattggtatcagcagagaccagggaaagcccctaagctcctgatctatgctgcatccagtttggaaagtggggtcccatcaaggttcagtggcagtggatctgggacagatttcactctcaccatcagcagtctgcaacctgaagattttgcaacttactactgtcaacagagttacagtaccctgtacacttttggccaggggaccaagctggagatcaaac

SEQ ID NO: 10945 - DNA, 325 bp, Homo sapiens
gacatccagatgacccagtctccttccaccctgtctgcatctgtaggagacagagtcaccatcacttgccgggccagtcagagtattagtagctggttggcctggtatcagcagaaaccagggaaagcccctaagctcctgatctataaggcatctagtttagaaagtggggtcccatcaaggttcagcggcagtggatctgggacagaattcactctcaccatcagcagcctgcagcctgatgattttgcaacttattactgccaacagtataatagttattccctattcactttcggccctgggaccaaagtggatatcaaac

SEQ ID NO: 10946 - DNA, 334 bp, Homo sapiens
gatattgtgatgactcagtctccactctccctgcccgtcacccctggagagccggcctccatgtcctgcaggtctagtcagagcctcctccatagtaatggatacaactatttggattggtacctgcagaagccagggcagtctccacagctcctgatctatttgggttctaatcgggcctccggggtccctgacaggttcagtggcagtggatcaggcacagatttttcactgaaaatcagcagagtggaggctgaggatgttggggtttattactgcatgcaagctctacatactcccactttcggcggagggaccaaggtggagatcaaac

SEQ ID NO: 10947 - DNA, 323 bp, Homo sapiens
gacatccagatgacccagtctccatcctcactgtctgcatctgtaggagacagagtcaccatcacttgtcgggcgagtcagggcattagcaattatttagcctggtttcagcagaaaccagggaaagcccctaagtccctgatctatgctgcatccagtttgcaaagtggggtcccatcaaagttcagcggcagtggatctgggacagatttcactctcaccatcagcagcctgcagcctgaagattttgcaacttattactgccaacagtataatagttaccctgatcaccttcggccaagggacacgactggagattaaac

SEQ ID NO: 10948 - DNA, 334 bp, Homo sapiens
cagtctgccctgactcagcctgcctccgtgtctgggtctcctggacagtcgatcaccctctcctgcactggaaccagcagtgacgttggtggttataagtatgtctcctggtaccaacaacaccccggcaaagccccccaactcatgatttatgatgtcagtaatcggccctcaggggtttctaatcgcttctctggctccaagtctggcaacacggcctccctgaccatctctgggctccaggctgaggacgaggctgattattactgcagctcatatacaagcaccagcactcctgtggtattcggcggagggaccaagctgaccgtcctag

SEQ ID NO: 10949 - DNA, 328 bp, Homo sapiens
gacatccagatgacccagtctccatccttcctgtctgcatttgtaggagacagagtcaccatcacttgccgggcaagtcagagcattagcaggtatttaaattggtatcaacagaaaccagggaaagcccctaagctcctgatcaatgctgcatccagtttgcaaagtggggtcccatcaaggttcagtggcagtggatctgggacagatttcactctcaccatcagcagtctgcaacctgaagattttgcaacttactactgtcaacagagttacagtacctcgctgatgtacacttttggccaggggaccaagctggagatcaaac

SEQ ID NO: 10950 - DNA, 325 bp, Homo sapiens
gacatccagatgacccagtctccatcctccctgtctgcatctgtaggagacagagtcaccatcacttgccaggcgagtcaggacattagcaattatttaaattggtatcagcagaagccagggaaagcccctaagctcctgatctacgatgcatccaatttggaaacaggggtcccatcaaggttcagtggaagtggatctgggacagattttactttcaccatcaggagcctgcagcctgaagacattgcagtatattactgtcaacactatgataatccccctcaactcactttcggccctgggaccaaagtggaaatcaaac

SEQ ID NO: 10951 - DNA, 322 bp, Homo sapiens
gacatccagatgacccagtctccatcctccctgtctgcatctgtaggagacagagtcaccatcacttgccaggcgagtcaggacattagcatctatttaaattggtatcagcaaaaaccagggaaagcccctaagctcctgatctacgatgcatccaatttgaaaacaggggtcccatcaaggttcagtggaagtggatctgggacagattttactttcaccatcagcagcctgcagcctgaagatattgcaacatattactgtcaacagtatgataatctcccagtcactttcggccctgggaccaaagtggacatcaaac

SEQ ID NO: 10952 - DNA, 340 bp, Homo sapiens; identical to SEQ ID NO: 905

SEQ ID NO: 10953 - DNA, 325 bp, Homo sapiens; identical to SEQ ID NO: 999

SEQ ID NO: 10954 - DNA, 328 bp, Homo sapiens
tcctatgtgctgactcagccaccctcggtgtcagtggccccaggaaagacggccaggattacctgtgggggaaacaacattggaagtaaaagtgtgcactggtaccagcagaagccaggccaggcccctgtgctggtcgtctatgatgataacgaccggccctcagggatccctgagcgattctctggctccaactctgggaacacggccaccctgaccatcagcagggtcgaagccggggatgaggccgagtatttctgtcaggtgtgggatagtagtagtgatcacccgatggtcttcggaactgggaccaaggtcaccgtcctag

SEQ ID NO: 10955 - DNA, 325 bp, Homo sapiens
tcctatgtgctgactcagccaccctcggtgtcagtggccccaggaaagacggccacgattacctgtgggggaaacagcattggaagtaaaaatgtgcactggtaccagcagaagccaggccaggcccctgtgctggtcgtctatgatgacagcgaccggccctcagggatccctgagcgattctctggctccaactctgggaacacggccaccctgaccatcaacagggtcgaagccggggatgaggccgactattactgtcaggtgtgggatagtagtggtgatcattgggtgttcggcggagggaccaagctgaccgtcctag

SEQ ID NO: 10956 - DNA, 334 bp, Homo sapiens
cagtctgtgctgacgcagccgccctcagtgtctggggccccagggcagagggtcaccatctcctgcactgggagcagctccaacatcggggcaggttatgatgtacactggtaccagcagtttccaggaacagcccccaaactcctcatctatggtaacagtaatcggccctcaggggtccctgaccgattctctgggtccaagtctggcacctcagcctccctggccatcactgggctccaggctgaggatgaggctgattattactgccagtcctatgacagcagcctgagtggttgggtgttcggcggagggaccaagctgaccgtcctag

SEQ ID NO: 10957 - DNA, 331 bp, Homo sapiens
cagtctgccctgactcagcctgcctccgtgtctgggtctcctggacagtcgatcaccatctcctgcactggaaccagcagtgacgttggtggttataagtatgtctcctggtaccaacagcacccaggcaaagcccccaaactcatgatttctgatgtcagtaatcggccctcaggggtttctaatcgcttctctggctccaagtctggcaacacggcctccctgaccatctctgggctccaggctgaggacgaggctgattattactgcagctcatatacaaccagcagcactctcgtcttcggaactgggaccaaggtcaccgtcctag

SEQ ID NO: 10958 - DNA, 331 bp, Homo sapiens
aattttatgctgactcagccccactctgtgtcggagtctccggggaagacggtaaccatctcctgtacccgcagcagtggcagcattgccagcaactatgtgcagtggtaccaacagcgcccgggcagttcccccaccactgtgatctatgaggataaccaaagaccctctggggtccctgatcggttctctggctccatcgacagctcctccaactctgcctccctcaccatctctggactgaagactgaggacgaggctgattactactgtcagtcttatgatagcagcaaggtggtattcggcggagggaccaagctgaccgtcctag

SEQ ID NO: 10959 - DNA, 329 bp, Homo sapiens
aattttatgctgactcagccccactctgtgtcggagtctccggggaagacggtaaccatctcctgcacccgcagcagtggcagcattgccagcaactatgtgcagtggtaccagcagcgcccgggcagttcccccaccactgtgatctatgaggataaccaaagaccctctggggtccctgatcggttctctggctccatcgacagctcctccgactctgcctccctcaccatctctggactgaagactgaggacgaggctgactactactgtcagtcttatgatagtagcaaggtggtattcggcggagggaccaagctgaccgtcct

SEQ ID NO: 10960 - DNA, 322 bp, Homo sapiens
gacatccagatgacccagtctccatcctccctgtctgcatctgtaggagacagagtcaccatcacttgccaggcgagtcaggacattagcaactatttaaattggtatcagcagagaccagggaaagcccctaagctcctgatctacgatgcatccaatttggaaacaggggtcccatcaaggttcagtggaagtggatctgggacagattttactttcaccatcagcagcctgcagcctgaagatattgcaacatattactgtcaacagtatgatgatctccctctgactttcggccctgggaccaaagtggatatcaaac

SEQ ID NO: 10961 - DNA, 322 bp, Homo sapiens; identical to SEQ ID NO: 927

SEQ ID NO: 10962 - DNA, 322 bp, Homo sapiens; identical to SEQ ID NO: 837

SEQ ID NO: 10963 - DNA, 331 bp, Homo sapiens; identical to SEQ ID NO: 9439

SEQ ID NO: 10964 - DNA, 331 bp, Homo sapiens
cagtctgccctgactcagcctgcctccgtgtctgggtctcctggacagtcgatcaccatctcctgcactggaaccagcagtgacgttggtggttataactatgtctcctggtaccaacagcacccaggcaaagcccccaaagtcatgatttatgatgtcagtaatcggccctcaggggtttctaatcgcttctctggctccaagtctggcaacacggcctccctgaccatctctgggctccaggctgaggacgaggctgattattactgcagctcatatacaagtagcagcacttgggtgttcggcggagggaccaagctgaccgtcctag

SEQ ID NO: 10965 - DNA, 337 bp, Homo sapiens
gatgttgtgatgactcagtctccactctccctgcccgtcacccttggacagccggcctccatctcctgcaggtctagtcaaagcctcgtatacagtgatggaagcacctacttgacttggtttcagcagaggccaggccaatctccaaggcgcctaatttataaggtttctaaccgggactctggggtcccagacagattcagcggcagtgggtcaggcactgatttcacactgaaaatcagcagggtggaggctgaggatgttggggtttattactgcatgcaaggtacacactggcctccgacgttcggccaagggaccaaggtggaaatcaaac

SEQ ID NO: 10966 - DNA, 328 bp, Homo sapiens
tcctatgagctgacacagccaccctcggtgtcagtgtccccaggacagacggccaggatcacctgctctggagatgcattgccaaagcaatatgcttattggtaccagcagaagccaggccaggcccctgtcctggtgatatataaagacagtgagaggccctcagggatccctgagcgattctctggctccagctcagggacaacagtcacgttgaccatcagtggagtccaggcagaagacgaggctgactattactgtcaatcagcagacagcagtggtaccatcggggtggtattcggcggagggaccaagctgaccgtcctag

SEQ ID NO: 10967 - DNA, 325 bp, Homo sapiens
gaaatagtgatgacgcagtctccagccaccctgtctgtgtctccaggggaaagagccaccctctcctgcagggccagtcagagtgttagcagcaacttagcctggtaccagcagaaacctggccaggctcccaggctcctcatctatggtgcatccaccagggccactggtatcccagccaggttcagtggcagtgggtctgggacagagttcactctcaccatcagcagcctgcagtctgaagattttgcagtttattactgtcagcagtataataactggcctccggccacttttggccaggggaccaagctggagatcaaac

SEQ ID NO: 10968 - DNA, 322 bp, Homo sapiens
gacatccagatgacccagtctccttccaccctgtctgcatctgtaggagacagagtcaccatcacttgccgggccagtcagagtattagtagctggttggcctggtatcagcagaaaccagggaaagcccctaagctcctgatctataaggcatctagtttagaaagtggggtcccatcaaggttcagcggcagtggatctgggacagaattcactctcaccatcagcagcctgcagcctgatgattttgcaacttattactgccaacagtataatagttatgctttcactttcggccctgggaccaaagtggatatcaaac

SEQ ID NO: 10969 - DNA, 319 bp, Homo sapiens
tcctatgagctgactcagccaccctcagtgtccgtgtccccaggacagacagccagcatcacctgctctggagataaattgggggataaatatgcttgctggtatcagcagaagccaggccagtcccctgtgctggtcatctatcaagataccaagcggccctcagggatccctgagcgattctctggctccaactctgggaacacagccactctgaccatcagcgggacccaggctatggatgaggctgactattactgtcaggcgtgggacagcggcactgcggtattcggcggagggaccaagctgaccgtcctag

SEQ ID NO: 10970 - DNA, 319 bp, Homo sapiens
gaaactgtgttgacacagtctccagccaccctgtctttgtctccaggggaaagagccaccctctcctgcagggccagtcagagtgttagcaactacttagcctggtaccaacagaaacctggccaggctcccaggctcctcatctatgatgcatccaacagggccactggcatcccagccaggttcagcggcagtgggtctgggacagacttcactctcaccatcagcagcctagagtctgaagattttgcagtttattactgtcaacagggtaccaagtggcgaacgttcggccaagggaccaaggtggaaagcaaac

SEQ ID NO: 10971 - DNA, 325 bp, Homo sapiens
tcctatgtgctgactcagccaccctcggtgtcagtggcccctggaaagacggccaggattccctgtgggggaagcaacattggaagtacaactgtacactggtaccagcagaagccaggccaggcccctgtgctggtcgtctatgatgatagcgaccggccctcagggatccctgaccgattctctggctccaactctgggaacacggccaccctgaccatcagcagggtcgaagccggggatgaggccgactattactgtcaagtgtgggatagtgctggtgatcattgtgtcttcggaactgggaccaaggtcaccgtcctag

SEQ ID NO: 10972 - DNA, 322 bp, Homo sapiens
gacatccagatgacccagtctccatcctccctgtctgcatctgtaggagacagagtcaccatcacttgccgggcaagtcagggcattagaaatgatttaggctggtatcagcagaaaccagggaaagcccctaagcgcctgatctatgctgcatccagtttgcaaagtggggtcccatcaaggttcagcggcagtggatctgggacagaattcactctcacaatcagcagcctgcagcctgaagattttgcaacttattactgtctacagcataatagttaccctctcaccttcggccaagggacacgactggagattaaac

SEQ ID NO: 10973 - DNA, 331 bp, Homo sapiens
caatctgtgctgacgcagccgccctcagtgtctggggccccagggcagagggtcaccatctcctgcactgggagcagctccaacatcggggcaggttttgatgtacactggtaccagcaccttccaggaacagcccccaaactcctcatctatggtaacaacaatcggccctcaggggtccctgaccgattttctggctccaggtctggcacctcagcctccctggccatcactgggctccaggctgaggatgaggctgattactactgccagtcctatgacaccagcctgagtgttgtgttcggaggaggcacccagctgaccgtcctcg

SEQ ID NO: 10974 - DNA, 325 bp, Homo sapiens
gaaattgtgttgacacagtctccagccaccctgtctttgtctccaggggaaagagccaccctctcctgcagggccagtcagagtgttagcagctacttagcctggtaccaacagaaacctggccaggctcccaggctcctcatctatgatgcatccaacagggccactggcatcccagccaggttcagtggcagtgggtctgggacagacttcactctcaccatcagcagcctagagcctgaagattttgcagtttattactgtcagcagcgtagcaactggccttcgagggccttcggccaagggacacgactggagattaaac

SEQ ID NO: 10975 - DNA, 328 bp, Homo sapiens
cagactgtggtgactcaggagccctcactgactgtgtccccaggagggacagtcactctcacctgtgcttccagcactggagcagtcaccagtggttactatccaaactggttccagcagaaacctggacaagcacccagggcactgatttatagtacaagcaacaaacactcctggacccctgcccggttctcaggctccctccttgggggcaaagctgccctgacactgtcaggtgtgcagcctgaggacgaggctgagtatttctgcctgctctactatggtggtgctcaactattcggcggagggaccaggctgaccgtcctag

SEQ ID NO: 10976 - DNA, 325 bp, Homo sapiens
tcttctgagctgactcaggaccctgctgtgtctgtggccttgggacagacagtcaggatcacatgccaaggagacagcctcagaagctattatgcaaggtggtaccagcagaagccaggacaggcccctgtacttgtcatctatggtaaaaacaaccggccctcagggatcccagaccgattctctggctccagctcaggaaacacagcttccttgaccatcactggggctcaggcggaagatgaggctgactattactgtaactcccgggacagcagtggtaaccatctggtattcggcggagggaccaaggtgaccgtcctag

SEQ ID NO: 10977 - DNA, 322 bp, Homo sapiens
gacatccagatgacccagtctccatcctccctgtctgcatctgtaggagacagagtcaccatcacttgccaggcgagtcaggacattaacaagtatttaaattggtatcagcagaaaccagggaaagcccctaaactcctgatctacgatgcatccaatctggaaacaggggtcccatcaaggttcagtggaagtggatctgggacagattttactttcaccatcagcagcctgctgcctgaagatattgcaacatattactgtcaacagtatgataatctccccccctttttcggccctgggaccaaagtggatatcaaac

SEQ ID NO: 10978 - DNA, 325 bp, Homo sapiens; identical to SEQ ID NO: 999

SEQ ID NO: 10979 - DNA, 328 bp, Homo sapiens
gaaattgtgttgacgcagtctccacggaccctgtctttgtctccaggggaaagagccaccctctcctgcagggccagtcagagtgtcagcagcagctacttagcctggtaccagcagaaacctggccaggctcccaggctcttcatctatggtgcatccagcagggccactggcatcccagacaggttcagtggcagtgggtctgggacagacttcactctctccatcagcagactggagcctgaagattttgcagtgtattattgtcagcactatggtggctcacgggggtacacttttggccaggggaccaggctggagatcaaac

SEQ ID NO: 10980 - DNA, 322 bp, Homo sapiens
gaaatagtgatgacgcagtctccagccaccctgtctgtgtctccaggggaaagagtcaccctctcctgcagggccagtcagagtgttagcagcaacttagcctggtaccttcagaaacctggccaggctcccaggctcctcatctatggtgcatccaccagggccactggtatcccagtcaggttcagtggcagtgggtctgggacaaaattcactctcaccatcagcagcctgcagtctgaagattttgcagtttattactgtcagcagtataataactggcctctcactttcggcggggggaccaaggtggagatcaaac

SEQ ID NO: 10981 - DNA, 331 bp, Homo sapiens
cagtctgccctgactcagcctgcctccgtgtctgggtctcctggacagtcgatcaccatctcctgcactggaaccagcagtgacgttggtggttataactttgtctcctggtaccaacagtacccaggcaaagcccccaaagtcatgatttatgatgtcagtaatcggccctcaggggtttctaatcgcttctctggttccaagtctggcaacacggcctccctgaccatctctgggctccaggctgaggacgaggctgactattactgcagctcatatacaggcagcagcacttgggttttcggcggagggaccaagctgaccgtcctag

SEQ ID NO: 10982 - DNA, 325 bp, Homo sapiens
tcctatgtgctgactcagccaccctcggtgtcagtggccccaggaaagacggccaggattacctgtgggggaaacaacattggaagtaaaagtgtgcactggttccagcagaagccgggccaggcccctgtgctggtcgtctatgatgatagcgaccggccctcagggatccccgagcgattctctggctccaactctgggaacacggccaccctgaccttcagcagggtcgaagccggggatgaggccgactattactgtcaggtgtgggatagtagtagtgatcattatgtcttcggaactgggaccaaggtcaccgtcctag

SEQ ID NO: 10983 - DNA, 337 bp, Homo sapiens
gatattgtgatgacccagactccactctctctgtccgtcacccctggacagccggcctccatctcctgcaagtctaatcagagcctcctgcatagtgatggaaagacctatttgtattggtacctgcagaagccaggccagcctccacagctcctgatctatgaggtttccaaccggttctctggagtgccagataggttcagtggcagcgggtcagggacagatttcacactgaaaatcagccgggtggaggctgaggatgttggggtttattactgcatgcaaagtatacagctcgcgctcactttcggcggagggaccaaggtggagatcaaac

SEQ ID NO: 10984 - DNA, 322 bp, Homo sapiens
gacatccagatgacccagtctccatcctccctgtctgcatctgtaggagacagagtcaccatcacttgccgggcaagtcagggcattagaaatgatttaggctggtatcagcagaaaccagggaaagcccctaagcgcctgatctatgctgcatccagtttgcaaagtggggtcccatcaaggttcagcggcagtggatctgggacagaattcactctcacaatcagcagcctgcagcctgaagattttgcaacttattattgtctacaacataatagttaccctcggacgttcggccaagggaccaaggtggaaatcaaac

SEQ ID NO: 10985 - DNA, 328 bp, Homo sapiens
cagtctgccctgactcagcctccctccgcgtccgggtctcctgggcagtcagtcaccatctcctgcactggaaccagcagtgacgttggttatgactatgtctcctggtaccaacagcaccccggcaaagcccccaaactcatgatttatgaggtcactaagcggccctcaggggtccctgatcgcttctctggctccaagtctggcaacacggcctccctgaccgtctctgggctccaggctgaggatgaggctgattattactgcggctcatatgcaggcagcaacaatttggtattcggcggagggaccaagctgaccgtcctag

SEQ ID NO: 10986 - DNA, 334 bp, Homo sapiens; identical to SEQ ID NO: 9273

SEQ ID NO: 10987 - DNA, 325 bp, Homo sapiens
gaaattgtgttgacgcagtctccaggcaccctgtctttgtctccaggggaaagagccaccctctcctgcagggccagtcagagtgttagcagcagctacttagcctggtaccagcagaaacctggccaggctcccaggctcctcatctatggtgcatccagcagggccactggcatcccagacaggttcagtggcagtgggtctgggacagacttcactctcaccatcagcagactggagcctgaagattttgcagtgtattactgtcagcagtatggtagctcatcttggacgttcggccaagggaccaaggtggaaatcaaac

SEQ ID NO: 10988 - DNA, 334 bp, Homo sapiens
cagtctgtgctgacgcagccgccctcagtgtctggggccccagggcagagggccaccatctcctgcactgggagcagctccaatatcggggcaggttatgatgtacactggtaccagcagcttccaggagcagcccccaaactcctcatgtatggtaacaacaatcggccctcaggggtccctgaccgattctctggctccaagtctggcacctcagcctccctggccatcactgggctccagactgaggatgaggctgattattactgcctgtcctttgacaggagcctgagtggttatgtcttcggaactgggaccaaggtcaccgtcctag

SEQ ID NO: 10989 - DNA, 334 bp, Homo sapiens; identical to SEQ ID NO: 9374

SEQ ID NO: 10990 - DNA, 337 bp, Homo sapiens
gatattgtgatgacccagactccactctcctcacctgtcacccttggacagccggcctccatctcctgcaggtctagtcaaagcctcgtacacagtgatggaaacacctacttgagttggcttcagcagaggccaggccagcctccaagactcctaatttataggatttctaaccggttctctggggtcccagacagattcagtggcagtggggcagggacagagttcacactgaaactcagcagggtggaagctgaagatgtcggggtttattactgcatgcaagctacacaattcccgtacacttttggccaggggaccaagctggagatcaaac

SEQ ID NO: 10991 - DNA, 334 bp, Homo sapiens
cagtctgtgctgacgcagccgccctcagtgtctggggccccagggcagagggtcaccatctcctgcactgggagcagctccaacatcgggacaggttatgatgtacactggtaccagcagcttccacgaacagcccccaaactcctcatctatgctaacagcaatcggccctcaggggtccctgaccgattctctggctccaagtctggcacctcagcctccctggccatcactgggctccaggctgaggatgaggctaattattactgccagtcctatgacaacagcctgagtgcttctgtgttcggaggaggcacccagctgaccgtcctcg

SEQ ID NO: 10992 - DNA, 331 bp, Homo sapiens
cagtctgtgttgacgcagccgccctcagtgtctgcggccccaggacagaaggtcaccatctcctgctctggaagcagctccaacattgggaataattatgtgtcctggtaccagcacctcccaggaacagcccccaaactcctcatctatgaaaataataagcgaccctcagggattcctgaccgattctctggctcctggtctggcacgtcagccaccctggacatcaccggactccagactggggacgaggccgattattactgcggaacatgggatagcagcctgagtgctggggtgttcggcggagggaccgagctgaccgtcctag

SEQ ID NO: 10993 - DNA, 326 bp, Homo sapiens
cagtctgccctgactcaacctccctcagtgtccgggtctcctggacagtcagtcaccatctcctgcactggaaccagcagtgatgttggtgcttataactatgtctcctggtaccaacaacacccaggcaaagcccccaaactcatgatttatgatgtcagtgagcggccctcaggggtccctgctcgcttctctggctccaagtctggcaacacggcctccctgaccatctctgggctccaggctgacgatgaggctgattattactgcagctcatatgcagtcacctacactccgttcggcggggggaccaagctgaccgtcct

SEQ ID NO: 10994 - DNA, 328 bp, Homo sapiens
tcctatgagctgacacagccaccctcggtgtcagtgtccccaggacaaacggccaggatcacctgctctggagatgcattgccaaaaaaatatgcttattggtaccagcagaagtcaggccaggcccctgtgctggtcatctatgaggacagcaaacgaccctcgggggtccctgagagattctctggctcaagctcagggacaatggccaccttgactatcagtggggcccaggtggaggatgaaggtgactactactgttactcaacagacagcagtgatgatcatttgggatttttcggcggagggaccaagctgaccgtcctag

SEQ ID NO: 10995 - DNA, 337 bp, Homo sapiens
gatattgtgatgactcagtctccactctccctgcccgtcacccctggagagccggcctccatctcctgcaggtctagtcagagcctcctgcatagtaatggatacaactatttggattggtacctgcagaagccagggcagtctccacagctcctgatctatttgggttctaatcgggcctccggggtccctgacaggttcagtggcagtggatcaggcacagattttacactgaaaatcagcagagtggaggctgaggatgttggggtttattactgcatgcaagctctacaaactcctcggacgttcggccaagggaccaaggtggaaatcaaac

SEQ ID NO: 10996 - DNA, 325 bp, Homo sapiens
gaaattgtgttgacgcagtctccaggcaccctgtctttgtctccaggggaaagagccaccctctcctgcagggccagtcagagtgttagcagcagctacttagcctggtaccagcagaaacctggccaggctcccaggctcctcatctatggtgcttccagcagggccactggcatcccagacaggttcagtggcagtgggtctgggacagacttcactctcaccatcagcagactggagcctgaagattttgcagtgtattactgtcagcagtatggtagctcaccgtggacgttcggccaagggaccaaggtggaaatcaaac

SEQ ID NO: 10997 - DNA, 337 bp, Homo sapiens; identical to SEQ ID NO: 10995

SEQ ID NO: 10998 - DNA, 322 bp, Homo sapiens
gacatccagatgacccagtctccatcctccctgtctgcatctgtaggagacagagtcaccatcacttgccgggcgagtcagggcattagcaattatttagcctggtatcagcagaaaccagggaaagttcctaagctcctgatctatgctgcatccactttgcaatcaggggtcccatctcggttcagtggcagtggatctgggacagatttcactctcaccatcagcagtctgcaacctgaagattttgcaacttactactgtcaacagagttacactaccccgtggacgttcggccaagggaccaaggtggaaatcaaac

SEQ ID NO: 10999 - DNA, 319 bp, Homo sapiens
tcctatgaactgactcagccaccctcagtgtccgtgtccccaggacagacagccagcatcacctgctctggagataaattgggggacaaatatgcttgttggtatcagcagaagccaggccagtcccctgtgctggtcatctatcaggataacaagcggccctcagggatccctgagcgattctctggctccaactctgggaacacagccactctgaccatcggcgggacccaggctatggatgaggctgactattactgtcaggcgtgggacagcagcactgcggtgttcggcggagggaccaagctgaccgtcctag

SEQ ID NO: 11000 - DNA, 330 bp, Homo sapiens
cagtctgccctgactcagcctgcctccgtgtctgggtctcctggacagtcgatcaccatctcctgcactggaaccaacagtgacgttggtgcttataactatgtctcctggtaccaacaacacccaggcaaagcccccagactcatgatttatgatgtcagtaatcggccctcaggggttcctaatcgcttctctggctccaagtctggcaacacggcctccctgaccatctctgggctccaggctgaggacgaggctgattattactgcaactcatatacaagcagcagtactctcgcattcggcggagggaccaagctgaccgtccta

SEQ ID NO: 11001 - DNA, 322 bp, Homo sapiens
gacatccagatgacccagtctccatcctccctgtctgcatctgtcggagacagagtcaccatcacttgccgggcgagtcagggcattagcaattctttagtctggtatcagcagaagccagggaaagcccctaacctcctgctctatgctgcatccagattggaaagtggggtcccatccaggttcagtggcagtggatctgggacggattacagtctcaccatcagcagcctgcagcctgaagattttgcaacttattactgtcaacagtattatagtacaccgtatacttttggccaggggaccaagctggagatcaaac

SEQ ID NO: 11002 - DNA, 322 bp, Homo sapiens; identical to SEQ ID NO: 10725

SEQ ID NO: 11003 - DNA, 325 bp, Homo sapiens
tcctatgagctgacacagccaccctcggtgtcagtgtccccaggacaaacggccaggatcacctgctctggagatgcattgccaaaaaaatatgcttattggtaccagcagaagtcaggccaggcccctgtgctggtcatctatgaggacagcaaacgaccctccgggatccctgagagattctctggctccagctcagggacaatggccaccttgactatcagtggggcccaggtggaggatgaagctgactactactgttactcaacagacagcagtggtcggttttgggtgttcggcggagggaccaagctgaccgtcctag

SEQ ID NO: 11004 - DNA, 340 bp, Homo sapiens
gacatcgtgatgacccagtctccagagtccctggctgtgtctctgggcgagagggccaccatcaactgcaagtccagccagagtgttttatacagctccaacaataaaaagtacttagcttggtaccagcagaaaccaggacagcctcctaagttgctcatttattgggcatctacccgggaatccggggtccctgaccgattcagtggcagcgggtctgggacagatttcactctcaccatcagcagcctgcaggctgaagatgtggcagtttattactgtcagcaatattatagtactcctcggacgttcggccaagggaccaaggtggaaatcaaac

SEQ ID NO: 11005 - DNA, 334 bp, Homo sapiens
gatattgtgatgacccagactccactctcctcacctgtcacccttggacagccggcctccatctcctgcaggtctactcaaagcctcgtacacagtgatggaaacacctacttgagttggcttcagcagaggccaggccagcctccaagactcctaatttataagatttctaaccggttctctggggtcccagacagattcagtggcagtggggcagggacagatttcacactgaaaatcagcagggtggaagctgaggatgtcggggtttattactgcatgcaagctacacaatttcctcacacttttggccaggggaccaagctggagatca

SEQ ID NO: 11006 - DNA, 330 bp, Homo sapiens
cagtctgccctgactcagcctgcctccgtgtctgggtctcctggacagtcgatcaccatctcctgcactggaaccagcagtgacgttggtgattataattatgtctcctggtaccaacagcacccaggcgaagcccccaaactcatgatttatgctgtcagtaatcggccctcaggggtttctaatcgcttctctgcctccaagtctggcaacacggcctccctgaccatctctgggctccaggctgaggacgaggctgattattactgcagctcatatacaagcaccagcacttatgtcttcggaactgggaccaaggtcaccgtccta

SEQ ID NO: 11007 - DNA, 331 bp, Homo sapiens
cagtctgccctgactcagcctcgctcagtgtccgggtctcctggacagtcagtcaccatctcctgcactggaacgagcagtgatgttggtggttataactatgtctcctggtaccaacagcacccaggcagagcccccaaattcatgatttatgatgtcactaagcggccctcaggggtccctgatcgcttctctggctccaagtctggcaacacggcctccctgaccatctctgggctccaggctgaagatgaggctgattattactgctgttcatatgcaggcaactacatttatgtcttcggaagtgggaccaaggtcaccgtcctag

SEQ ID NO: 11008 - DNA, 324 bp, Homo sapiens
cctatgtgctgactcagccaccctcggtgtcagtggccccaggaaagacggccaggattacctgtgggggaaacaacattggaagtaaaagtgtgcactggtaccagcagaagccaggccaggcccctgtgctggtcgtctatgatgatagcgaccggccctcagggatccctgagcgattctctggctccaactctgggaacacggccaccctgaccatcagcagggtcgaagccggggatgaggccgactattactgtcaggtgtgggatagcagtagtgatctcgtggtattcggcggagggaccaagctgaccgtcctag

SEQ ID NO: 11009 - DNA, 334 bp, Homo sapiens
cagtctgtgctgacgcagccgccctcagtgtctggggccccagggcagagggtcaccatctcctgcactgggagcagctccaacatcggggcaggttatgatgtacactggtaccagcagcttccaggaacagcccccaaagtcctcatctatgggaacagcaatcggccctcaggggtccctgaccgattctctggctccaagtctggcacttcagcctccctggccatcactgggctccaggctgaggatgaggctgattattactgccagtcctacgacagcaccctgagtgatgtcgtattcggcggagggaccaagctgaccgtcctag

SEQ ID NO: 11010 - DNA, 331 bp, Homo sapiens
cagtctgccctgactcagcctgcctccgtgtctgggtctcctggacagtcgatcaccatctcctgcactggaaccagcagtgacgttggtggttatcactatgtctcctggtaccaacaacacccagacaaagcccccaaactcatgatttatgctgtcactaatcggccctcaggggtttctaatcgcttctctggctccaagtctggcaacacggcctccctggccatctctgggctccaggctgaggacgaggctgattattactgcagctcatatacaagcgacagcctttatgtcttcggaactgggaccaaggtcaccgtcctag

SEQ ID NO: 11011 - DNA, 319 bp, Homo sapiens; identical to SEQ ID NO: 8351

SEQ ID NO: 11012 - DNA, 325 bp, Homo sapiens
gacatccagatgacccagtctccatcctccctgtctgcatctgtaggagacagagtcaccatcacttgccaggcgagtcaggacattagcaactatttaaattggtatcagcagaaaccagggaaagcccctaagctcctgatctacgatgcatccaatttggaaacaggggtcccatcaaggttcagtggaagtggatctgggacagattttactttcaccatcagcagcctgcagcctgaagatattgcaacatattcttgtcaacagtatgataatctccctcggtacacttttggccaggggaccaagctggagatcaaac

SEQ ID NO: 11013 - DNA, 331 bp, Homo sapiens
cagtctgccctgactcagcctccctccgcgtccgggtctcctggacagtcagtcaccatctcctgcactggaaccagcagtgacgttggtggttataactatgtctcctggtaccaacgacacccaggcaaagcccccaaactcatgatttatgaggtcagtaagcggccctcaggggtccctgatcgcttctctggctccaagtctggcaacacggcctccctgaccgtctctgggctccaggctgaggatgaggctgattattactgcagctcagatgcaggcagcaacaatgtggtattcggcggagggaccaagctgaccgtcctag

SEQ ID NO: 11014 - DNA, 331 bp, Homo sapiens
cagtctgccctgactcagcctgcctccgtgtctgggtctcctggacagtcgatcaccatctcctgcactggaaccagcagtgatgttgagagttatcaccttgactcctggtaccaacagcacccaggcaaagcccccaaactgatgatttatgaggtcagtgagcggccctcagggatttctaatcgcttctctggctccaagtctggcgacacggcctccctgacaatctctgggctccaggctgaggacgaggctgattattactgctgctcatatgctggtaatagcacttgggtcttcggaactgggaccaaggtcaacgtcctag

SEQ ID NO: 11015 - DNA, 331 bp, Homo sapiens; identical to SEQ ID NO: 830

SEQ ID NO: 11016 - DNA, 331 bp, Homo sapiens
cagtctgccctgactcagcctgcctccgtgtctgggtctcctggacagtcgatcaccatctcctgcactggaaccagcagtgatgttgggagttataacgttgtctcctggtaccaacagcacgcaggcaaagcccccaaactcatgatttatgaggtcagtaggcggccctcaggggtttctaatcgcttctctggctccaagtctggcaacacggcctccctgacaatctctgggctccaggctgacgacgaggctgattattactgctgctcatatgcaggtagtaacacttgggtcttcggatctgggaccaaggtcatcgtcctag

SEQ ID NO: 11017 - DNA, 325 bp, Homo sapiens
gacatccagatgacccagtctccttccaccctgtctgcatctgtaggagacagagtcaccatcacttgccgggccagtcagagtatcagtagctggttggcctggtatcagcagaaaccagggaaagcccctaagctcctgatctataaggcatctagtttaacaagtggggtcccatcaagattcagcggcagtggatctgggacagaattcactctcaccatcagcagcctgcagcctgatgattttgcaacttattactgccaacagtataatagttattgggagtacacttttggccaggggaccaagctggagatcaaac

SEQ ID NO: 11018 - DNA, 331 bp, Homo sapiens
tcttatgtgctgactcagccaccctcggtgtcagtggccccaggaaagacggccaggattccctgtgggggaaacaacattggaagtaaaagtgtgcactggtaccagcagaagccaggccaggcccctgtgctggtcgtctatgatgatagcgaccggccctcagggatccctgagcgattctctggctccaattctgggaacacggccaccctgaccatcagcagggtcgaagccggggatgaggccgactattactgtcaggtgtgggatggtactagtgatcaccctggttgggtgttcggcggagggaccaagctgaccgtcctag

SEQ ID NO: 11019 - DNA, 322 bp, Homo sapiens
gacatccagatgacccagtctccatcttccgtgtctgcatctgtaggagacagagtcaccatcacttgtcgggcgagtcagggtattagcagctggttagcctggtatcagcagaaaccagggaaagcccctaagctcctgatctatgctgcatccagtttgcaaagtggggtcccatcaaggttcagcggcagtggatctgggacagatttcactctcaccatcagcagcctgcagcctgaagattttgcaacttactattgtcaacaggctaacagtttctcgctcactttcggcggagggaccaaggtggagatcaaac

SEQ ID NO: 11020 - DNA, 340 bp, Homo sapiens
gacatcgtgatgacccagtctccagactccctgactgtgtctctgggcgagagggccaccatcaactgcaagtccacccagagtcttttatacagctccaacaataagaactacttagcttggtaccagcagaaaccaggacagcctcctaagctgctcatttactgggcatctacccgggaatccggggtccctgaccgattcagtgccagcgggtctgggacagatttcactctcaccatcagcagcctgcagtctgaagatgtggcagtttattactgtcagcaatattatagtactcctcggacgttcggcctagggaccaaggtggaaatcaaac

SEQ ID NO: 11021 - DNA, 334 bp, Homo sapiens
cagtctgtgctgactcagccaccctcagcgtctgggacccccgggcagagggtcaccatctcttgttctggaagcagctccaacatcggaagtaatactgtaaactggtaccagcagctcccaggaacggcccccaaactcctcatctatagtaataatcagcggccctcaggggtccctgaccgattctctggctccaagtctggcacctcagcctccctggccatcagtgggctccagtctgaggatgaggctgattattactgtgcagcatgggatgacagcctgaatggtttttatgtcttcggaactgggaccaaggtcaccgtcctag

SEQ ID NO: 11022 - DNA, 322 bp, Homo sapiens
gacatccagatgacccaggctccttccaccctgtctgcatctgtaggagacagagtcaccatcacttgccgggccagtgagagtattagtaggtggttggcctggtatcagcagaaaccagggaaagccccgaagctcctgatctataaggcgtctagtttagaaagtggggtcccatcaaggttcagcggcagtggatctgagacagaattcactctcaccatcagcagcctgcagcctgatgattttgcaacttattactgccaacagtataatagttattctcggacgttcggccaagggaccaaggtggaaatcaaac

SEQ ID NO: 11023 - DNA, 322 bp, Homo sapiens
gacatccagatgacccagtctccatcctccctatctgcatctgtgggagacagagtcaccatcacttgccgggcaagtcagagcattatcagttatttaaattggtatcagcacaaaccagggaaagcccctaagctcctgatctatgctgcatccagtttgcaaagtggggtcccatcaaggttcggtggcagtggatctgggacagatttcactctcaccatcagcagtctgcaacctgaagattttgcaacttactactgtcaacagacttacagtacccctcccaccttcggccaagggacacgactggagattaaac

SEQ ID NO: 11024 - DNA, 322 bp, Homo sapiens
gacatccagatgacccagtctccatcctccctgtctgcatctgtaggagacagagtcaccatcacttgccgggcaagtcagagcattagcagctatttaaattggtatcagcagaaaccagggaaagcccctaagctcctgatctatgctgcatccagtttgcaaagtggggtcccatcaaggttcagtggcagtggatctgggacagatttcactctcaccatcagcagtctgcaacctgaagattttgcaacttactactgtcaacagagttacagtaccttcctcactttcggcggagggaccaaggtggagatcaaac

SEQ ID NO: 11025 - DNA, 325 bp, Homo sapiens
gaaatagtggtgacgcagtctccagccaccctgtctgtgtctccaggggaaagagccaccctctcctgcagggccagtcagcgtgttagcaccaacttagcctggtaccagcagaaacctggccaggctcccaggctcctcatctatggtgcatccaccagggccactggtatcccagccaggttcagtggcagtgggtctgggacagagttcactctcaccatcagcagcctgcagtctgaagattttgcagtttattactgtcagcagtataatgactggcctggctacacttttggccaggggaccaagctggagatcaaac

SEQ ID NO: 11026 - DNA, 319 bp, Homo sapiens
gacatccagatgacccagtctccatcttccgtgtctgcatctgtaggagacagagtcaccatcacttgtcgggcgagtcagggtattagtagctggttagcctggtatcagcagaaaccagggaaagcccctaagctcctgatctatgctgcatccagtttgcaaagtggggtcccatcaaggttcagcggcagtggatctgggacagaattcactctcaccatcagcagcctgcagcctgaagattttgcaacttactattgtcaacagactaacagtttccctcgtttcggcggagggaccaaggtggagatcaaac

SEQ ID NO: 11027 - DNA, 325 bp, Homo sapiens
gacatccagatgacccagtctccatcttccgtgtctgcatctgtaggagacagagtcaccatcacttgtcgggcgagtcagggtatcatcaactggttagcctggtatcagcagaaaccaggggaagcccctaagctcctgatctatgctgcatccagtttgcaaagtggggtcccatcaaggttcagcggcagtggatctgggacagatttcactctcaccatcagcagcctgcagcctgaagattttgcaacttactattgtcaacaggccaacagtttccctcaggtcactttcggcggagggaccaaggtggagatcaaac

SEQ ID NO: 11028 - DNA, 325 bp, Homo sapiens
gaaattgtgttgacacagtctccagccaccctgtctttgtctccaggggaaagagccaccctctcctgcagggccagtcagagtgttagcagctacttagcctggtaccaacagaaacctggccaggctcccaggctcctcatctatgatgcatccaacagggccactggcatcccagccaggttcagtggcagtgggtctgggacagacttcactctcaccatcagcagcctagagcctgaagattttgcagtttattactgtcagcagcgtagcaactggcctccggacacttttggccaggggaccaagctggagatcaaac

SEQ ID NO: 11029 - DNA, 322 bp, Homo sapiens
gaaattgtgttgacgcagtctccaggcaccctgtctttgtctccaggggaaagagccaccctctcctgcagggccagtcagagtattagcagcaactacttagcctggtaccagcagaaacctggccaggctcccaggctcctcatctatggtggatccagcagggccactggcttcccagacaggttcagtggcagtgagtctgggacagacttcactctcaccatcagcagactggaacctgaagattttgcagtttattactgtcagcagtatggtttttcatcttggacgttcggccaggggaccaaggtggaaatca

SEQ ID NO: 11030 - DNA, 325 bp, Homo sapiens
gacattgtgttgacgcagtctccaggcaccctgtctttgtctccaggggaaagagccaccctctcctgcagggccagtcagagtgttagcagcagctacttagcctggtaccagcagaaacctggccaggcccccaggctcctcatctatggtgcatccagcagggccactggcatcccagacaggttcagtggcagtgggtctgggacagacttcactctcaccatcagcagactggagcctgaagattttgcagtgtattattgtcagcaatatggtttctcatcttggacgttcggccaagggaccaaggtggaaatcaaac

SEQ ID NO: 11031 - DNA, 306 bp, Homo sapiens
gacatccagatgacccagtctccatcctccctgtctgcatctgtaggagacagagtcaccatcacttgccaggcgagtcaggacattaccaactatttaaattggtatcagcagaaaccagggaaagcccctaaggtcctgatctacgatgcatccaatttggaaacaggggtcccatcaaggttcagtggaagtggatctgggacagattttactttcaccatcagcggcctgcagcctgaagatattgcaacatattactgtcaacagtatcataatctcctcactttcggcggagggaccaag

SEQ ID NO: 11032 - DNA, 328 bp, Homo sapiens
cagtctgtgctgactcagccaccctcagcgtctgggacccccgggcagagggtcaccatctcttgttctggaagcagctccaacatcgggagtaatcctgtaaactggttccagcagctcccaggaacggcccccaaactcctcatctataataataatcagcggccctcaggggtccctgaccgattctctggctccaagtctggcacctcagcctccctggccatcagtgggctccagtctgaggatgaggctgattattactgtgcatcatgggatgacagcctgaatgtgctattcggcggagggaccaagctgaccgtcctag

SEQ ID NO: 11033 - DNA, 322 bp, Homo sapiens; identical to SEQ ID NO: 1645

SEQ ID NO: 11034 - DNA, 325 bp, Homo sapiens
gacatccagatgacccagtctccatcctccctgtctgcatctgtaggagacagagtcaccatcacttgccgggcaagtcagagcattagcagctatttaaattggtatcagcagaaactagggaaagcccctaagctcctgatctatgctgcatccactttgcaaagtggggtcccatcaaggttcagtggcagtggatctgggacagatttcactctcaccatcagcagtctgcaacctgaagattttgcaacttactactgtcaacagagttacattaccccgggttggacgttcggccaagggaccaaggtggaaatcaaac

SEQ ID NO: 11035 - DNA, 322 bp, Homo sapiens
gacatccagatgattcagtctccatcctccctgtctgcatctgtaggagacagagtcaccatcacttgccgggcaagtcagaacattagcagttatttaaattggtatcagcagaaaccagggaaagcccctaacttcctgatctatcctgcatccagtttgcaaagtggggtcccatcaaggttcagtggcagtggatctgggacagatttcactctcaccatcagcagtctgcaaccagaagattttgcaacttactactgtcaacagagttacagtaccccgctcactttcggcggagggaccaaggtggagatcaaac

SEQ ID NO: 11036 - DNA, 322 bp, Homo sapiens
gacatccagatgacccagtcttcatcttctgtgtctgcatctgtaggagacagagtcaccatcacttgtcgggcgagtcagggtattagcagctggttagcctggtatcagcagaaaccagggaaagcccctaagctcctgatctatggtgcatccagtttgcaaagtggggtcccatcaaggttcagcggcagtggatctgggacagatttcactctcactatcagcagcctgcagcctgaagattttgcaacttactattgtcaacaggctaacagtttccctcgcaccttcggccaagggacacgactggagataaaac

SEQ ID NO: 11037 - DNA, 319 bp, Homo sapiens; identical to SEQ ID NO: 1688

SEQ ID NO: 11038 - DNA, 321 bp, Homo sapiens
gacatccagatgacccagtctccatcttctgtgtctgcatctgtaggagacagagtcaccatcacttgtcgggcgagtcaggatattagcagctggttagcctggtatcagcagaaaccagggaaagcccctaagctcctgatctatggtgcatccagtttgcaaagtggggtcccatcaaggttcagcggcagtggatctgggacagatttcactctcactatcagcagcctgcagcctgaagattttgcaagttactattgtcaacaggctaacagtttccctctcactttcggcggggggaccaaggtggagatcaaa

SEQ ID NO: 11039 - DNA, 311 bp, Homo sapiens
gacattgtgctgacccagtctccagcctccttggccgtgtctccaggacagagggccaccatcacctgcagagccagtgagagtgtcagtttcttgggaataaacttaattcactggtatcagcagaaaccaggacaacctcctaaactcctgatttaccaagcatccaataaagacactggggtcccagccaggttcagcggcagtgggtctgggaccgatttcaccctcacaattaatcctgtggaagctaatgatactgcaaattattactgtctgcagaggcggagggaccaaggtggagatcaaac

SEQ ID NO: 11040 - DNA, 322 bp, Homo sapiens; identical to SEQ ID NO: 5184

SEQ ID NO: 11041 - DNA, 328 bp, Homo sapiens
cagtctgccctgactcagcctgcctccgtgtctgggtctcctggacagtcgatcaccatctcctgcactggaaccagcagtgaccttggtgcttttatctatgtctcctggtaccaacaccacccaggcaaagcccccaaactcatgatttatgatgtcagtaatcggccctcaggggtttctaatcgcttctctggctccaagtctggcaacacggcctccctgaccatctctgggctccaggctgaggacgaggctgattattactgcagttcatatacaagcagcagcacggtattcggcggagggaccaagctgaccgtcctag

SEQ ID NO: 11042 - DNA, 325 bp, Homo sapiens
gacatccagatgacccagtctccatcctccctgtctgcatctgtaggagacagagtcaccatcacttgccgggcaagtcagatcattagccggtatttaaattggtatcagcagaaatcagggaaagcccctgagctcctgatctatgctgcatccagtttgcaaagtggggtcccatcaaggttcagtggcagtggatctgggacagaattcactctcaccatcagcagtctgcaaccagaagattttgcaagttactactgtcaacagagttacagtacccctccgtggacgttcggccaaggcaccaaggtggaaatcaaac

SEQ ID NO: 11043 - DNA, 322 bp, Homo sapiens
gacatccagatgacccagtctccttccaccctgtctgcatctgtaggagacagagtcaccatcacttgccgggccagtcagagtattagtagctggttggcctggtatcagcagaaaccagggaaagcccctaaggtcctgatctataaggcgtctagtttagaaagtggggtcccatcaaggttcagcggcagtggatctgggacagaattcactctcaccatcagcagcctgcagcctgatgattttgcaacttattactgccaacagtataatagttatcctctcactttcggcggagggaccaaggtggagatcaaac

SEQ ID NO: 11044 - DNA, 322 bp, Homo sapiens
gacatccagatgacccagtctccatcctccctgtctgcatctgtaggagacagagtcaccatcacttgccgggcaagtcagagcattagcaggtatttaaattggtatcagcagaaaccagggaaagcccctaagctcctgatctatgctgcatccagtttgcaaagtggggtcccatcaaggttcagtggcagtggatctgggacagatttcactctcaccatcagcagtctgcaacctgaagattttgcaacttactactgtcaacagagttacactaccccgtggacgttcggccaagggaccaaggtggaaatcaaac

SEQ ID NO: 11045 - DNA, 370 bp, Homo sapiens
gaggtgcagctggtggagtctgggggaggcctggtcaagcctggggggtccctgagactctcctgtgcagcctctggattcaccttcagtagctatagcatgaactgggtccgccaggctccagggaaggggctggagtgggtctcatccattagtagtagtagtagttacatatactacgcagactcagtgaagggccgattcaccatctccagagacaacgccaagaactcactgtatctgcaaatgaacagcctgagagccgaggacacggctctgtattactgtgcgagagatctgggtaataatggttattccgtcgggtggttcgacccctggggccagggaaccctggtcaccgtctcctcag

SEQ ID NO: 11046 - DNA, 370 bp, Homo sapiens; identical to SEQ ID NO: 11045

SEQ ID NO: 11047 - DNA, 370 bp, Homo sapiens; identical to SEQ ID NO: 11045

SEQ ID NO: 11048 - DNA, 370 bp, Homo sapiens; identical to SEQ ID NO: 11045

SEQ ID NO: 11049 - DNA, 370 bp, Homo sapiens; identical to SEQ ID NO: 11045

SEQ ID NO: 11050 - DNA, 370 bp, Homo sapiens; identical to SEQ ID NO: 11045

SEQ ID NO: 11051 - DNA, 370 bp, Homo sapiens; identical to SEQ ID NO: 11045

SEQ ID NO: 11052 - DNA, 370 bp, Homo sapiens; identical to SEQ ID NO: 11045

SEQ ID NO: 11053 - DNA, 370 bp, Homo sapiens; identical to SEQ ID NO: 11045

SEQ ID NO: 11054 - DNA, 370 bp, Homo sapiens; identical to SEQ ID NO: 11045

SEQ ID NO: 11055 - DNA, 370 bp, Homo sapiens; identical to SEQ ID NO: 11045

SEQ ID NO: 11056 - DNA, 370 bp, Homo sapiens; identical to SEQ ID NO: 11045

SEQ ID NO: 11057 - DNA, 370 bp, Homo sapiens; identical to SEQ ID NO: 11045

SEQ ID NO: 11058 - DNA, 370 bp, Homo sapiens; identical to SEQ ID NO: 11045

SEQ ID NO: 11059 - DNA, 370 bp, Homo sapiens
gaggtgcagctggtggagtctgggggaggcctggtcaagcctggggggtccctgagactctcctgtgcagcctctggattcaccttcagtagctatagcatgaactgggtccgccaggctccagggaaggggctggagtgggtctcatccattagtagtagtagtagttacatatactacgcagactcagtgaagggccgattcaccatctccagagacaatgccaagaactcactgtatctgcaaatgaacagcctgagagccgaggacacggctctgtattactgtgcgagagatctgggtaataatggttattccgtcgggtggttcgacccctggggccagggaaccctggtcaccgtctcctcag

SEQ ID NO: 11060 - DNA, 370 bp, Homo sapiens; identical to SEQ ID NO: 11045

SEQ ID NO: 11061 - DNA, 370 bp, Homo sapiens; identical to SEQ ID NO: 11045

SEQ ID NO: 11062 - DNA, 370 bp, Homo sapiens; identical to SEQ ID NO: 11045

SEQ ID NO: 11063 - DNA, 370 bp, Homo sapiens; identical to SEQ ID NO: 11045

SEQ ID NO: 11064 - DNA, 370 bp, Homo sapiens; identical to SEQ ID NO: 11045

SEQ ID NO: 11065 - DNA, 370 bp, Homo sapiens; identical to SEQ ID NO: 11045

SEQ ID NO: 11066 - DNA, 370 bp, Homo sapiens; identical to SEQ ID NO: 11045

SEQ ID NO: 11067 - DNA, 370 bp, Homo sapiens; identical to SEQ ID NO: 11045

SEQ ID NO: 11068 - DNA, 370 bp, Homo sapiens; identical to SEQ ID NO: 11045

SEQ ID NO: 11069 - DNA, 364 bp, Homo sapiens
cagctgcagctgcaggagtcgggcccaggactggtgaagccttcggagaccctgtccctcacctgcactgtctctggtggctccatcagcagtaataattactattggggctggatccgccagcccccagggaaggggctggagtggattgggactatctattatactgggaccacctactacaacccgtccctcaaaagtcgagtcaccatatccgtagacacgtccaagaaccagttgtccctgaaactgagctctgtgaccgccgcagacacggctgtgtattactgtgcgagacatcaggccagtggctggggtatggtggatttctggggccagggaactttggtcaccgtctcctcag

SEQ ID NO: 11070 - DNA, 364 bp, Homo sapiens
cagctgcagctgcaggagtcgggcccaggactggtgaagccttcggagaccctgtccctcacctgcactgtctctggtggctccatcagcagtaataattactattggggctggatccgccagcccccagggaaggggctggagtggattgggactatctattatactgggagcacctactacaacccgtccctcaaaagtcgagtcaccatatccgtagacacgtccaagaaccagttgtccctgaaactgagctctgtgaccgccgcagacacggctgtgtattactgtgcgagacatcaggccagtggctggggtatggtggatttctggggccagggaactttggtcaccgtctcctcag

SEQ ID NO: 11071 - DNA, 364 bp, Homo sapiens; identical to SEQ ID NO: 11070

SEQ ID NO: 11072 - DNA, 364 bp, Homo sapiens; identical to SEQ ID NO: 11070

SEQ ID NO: 11073 - DNA, 364 bp, Homo sapiens; identical to SEQ ID NO: 11070

SEQ ID NO: 11074 - DNA, 364 bp, Homo sapiens; identical to SEQ ID NO: 11070

SEQ ID NO: 11075 - DNA, 364 bp, Homo sapiens; identical to SEQ ID NO: 11070

SEQ ID NO: 11076 - DNA, 364 bp, Homo sapiens
cagctgcagctgcaggagtcgggcccaggactggtgaagccttcggagaccctgtccctcacctgcactgtctctggtggctccatcagcagtaataattactattggggctggatccgccagcccccagggaaggggctggagtggattgggactatctattatactgggagcacctactacaacccgtccctccaaagtcgagtcaccatatccgtagacacctccaagaaccagttgtccctgaaagtgagctctgtgaccgccgcagacacggctgtgtattactgtgcgagacatcaggccagtggctggggtatggtggatttctggggccagggaactttggtcaccgtctcctcag

SEQ ID NO: 11077 - DNA, 367 bp, Homo sapiens
gaggtgcagctggtggagtctgggggaggcttggtacagccagggcggtccctgagactctcctgtacagtttctggattcacctttggtgattatactatgagctggttccgccaggctccagggaaggggctggagtgggtaggtttcattagaagcaaagctaatggtgggacaacagaatacgccgcgtctgtgaaaggcagattcaccgtctcaagagatgattccaaaagcatcgcctatctgcaaatgaacagcctgaaaaccgaggacacagccgtgtattactgtactagaggcggccagtgggagctactgacatttgactactggggccagggaaccctggtcaccgtctcctcag

SEQ ID NO: 11078 - DNA, 367 bp, Homo sapiens; identical to SEQ ID NO: 11077

SEQ ID NO: 11079 - DNA, 367 bp, Homo sapiens; identical to SEQ ID NO: 11077

SEQ ID NO: 11080 - DNA, 367 bp, Homo sapiens; identical to SEQ ID NO: 11077

SEQ ID NO: 11081 - DNA, 367 bp, Homo sapiens; identical to SEQ ID NO: 11077

SEQ ID NO: 11082 - DNA, 361 bp, Homo sapiens
gaggtgcagctggtgcagtctggagcagaggtgaaaaagtccggggagtctctggagatctcctgtaagggttctggatacagctttaccaactactggatcggctgggtgcgccagatgcccgggaaaggcctggagtggatgggggtcatctatcctggtgactctgataccagatacagcccgtccttccaaggccaggtcaccatctcagccgacaagtccatcagcaccgcctacctgcagtggagcagcctgaaggcctcggacaccgccatgtattactgtgcgactagtagcggatatagtggctacgaatttcctttctggggccagggaaccctggtcaccgtctcctcag

SEQ ID NO: 11083 - DNA, 361 bp, Homo sapiens; identical to SEQ ID NO: 11082

SEQ ID NO: 11084 - DNA, 361 bp, Homo sapiens
gaggtgcagctggtgcagtctggagcagaggtgaaaaagtccggggaatctctggagatctcctgtaagggttctggatacagctttaccaactactggatcggctgggtgcgccagatgcccgggaaaggcctggagtggatggggatcatctatcctggtgactctgataccagatacagtccgtccttccaaggccaggtcaccatctcaagcgacaagtccatcagcaccgcctacctgcagtggagcagcctgaaggcctcggacaccgccatgtattactgtgcgactagtagcggatatagtgactacgaatttcctttctggggccagggaaccctggtcgccgtctcctcag

SEQ ID NO: 11085 - DNA, 361 bp, Homo sapiens; identical to SEQ ID NO: 11082

SEQ ID NO: 11086 - DNA, 361 bp, Homo sapiens; identical to SEQ ID NO: 11082

SEQ ID NO: 11087 - DNA, 375 bp, Homo sapiens
caggttcagctggtgcagtctggagctgaggtgaagaagcctggggcctcagtgaaggtctcctgcaaggcttctggttacacctttaccaactatggtatcagctgggtgcgacaggcccctggacaagggcttgcttggatgggatggatcagcgcttacaatggcaacacaaactatgcacagaacttccagggcagagtcaccatgaccacagacacatccacgaccacagcctacatggaggtgaggagcctgagatctgacgacgcggccgtgtattactgtgcgagagattcacaggcttcggggagttattataacgactacggtatggacgtctggggccaagggaccacggtcaccgtctcctca

SEQ ID NO: 11088 - DNA, 375 bp, Homo sapiens; identical to SEQ ID NO: 11087

SEQ ID NO: 11089 - DNA, 375 bp, Homo sapiens; identical to SEQ ID NO: 11087

SEQ ID NO: 11090 - DNA, 375 bp, Homo sapiens; identical to SEQ ID NO: 11087

SEQ ID NO: 11091 - DNA, 358 bp, Homo sapiens
caggtgcaactgcaggagtcgggcccaggacaggtgaagccttgggagaccctgtccctcacctgcattgtctctggtgcctccatcactgttgactattgggcctggatccggcagcccccagggaagggactggaatgggttgcgtacttgtctcatgatggcagcacgaccttcaacccctccctccggagtcgaatctccatgtcaagagacacgtcccagaaccagttcactctgaaattgacctctgtgaccgctgcggacacggccctctatttttgtgcccgccttcatttttatcgttcggaggaattcgacccctggggccagggaaccctggtcaccgtctcctcag

SEQ ID NO: 11092 - DNA, 358 bp, Homo sapiens
caggtgcacctgcaggagtcgggcccaggactggtgaagccttcggagaccctgtccctcacctgcattgtctctggtggctccatcgctaattactactggagctggatccggcaggccccagggaagggactggagtggattggatatatctattacagtgggggcacgcagtacaatccgtccctccagagtcgagtcaccatatcagtagacacgtcccagaatcagttctccctgaagttgaactctgtgaccgccgcggacacggccgtctattactgtgcccgccttcattattatcgttcggaggagttcgacccctggggccagggaaccctagtcaccgtctcctcag

SEQ ID NO: 11093 - DNA, 358 bp, Homo sapiens
caggtgcagctacaggagtcgggcccaggactggtgaagccttcggagaccctgtccctcacttgcactgtctctggtggctccatcactggtcactactggagctggatccggcagccccccgggaagggactggagtggattgcctatatctattacactgggggcacccattacaacccctccctcacgggtcgagtcaccatatcagtggacgcgtccaagaaccagttctccctgaggttgacctccgtgaccgctgcggacacggccgtgtattattgtgcccgccttcattcctatcgttcggaggagttcgacccctggggccagggaaccctggtcaccgtctcttcag

SEQ ID NO: 11094 - DNA, 358 bp, Homo sapiens
caggtgcaggtgcaggagtcgggcccaggactggtgaagccttcggagaccctgtccctcacctgcattgtctctggtggttccatcagtaatcactactggagttggatccggcagcccccagggaagggactggagtggattggatatatctcttccagtgggagcacgaattacaacccctccctccagagtcgagtcaccatatcactggacacgccccagaaccagttctccctgacactgagttctgtgaccgctgcggacacggccgtgtattactgtgcccgccttcactcttattattcggaggagttcgacccctggggccagggaaccctggtcaccgtctcctcag

SEQ ID NO: 11095 - DNA, 375 bp, Homo sapiens
caggttcagctggtgcagtctggagctgacgtgaagaagcctggggcctcagtgaaggtctcctgcaaggcttctggttacacctttaccagctatggtatcagctgggtgcgacaggcccctggacaagggcttgagtggatgggatggatcagcgcttacaatggtaacacaaactatgcacagaagctccagggcagagtcaccatgaccagagacacatcaacgagcacagcctacatggagctgaggagcctgagatctgacgacacggccgtatattactgtgcgagagggtcgctacacctgttagggatgaactactactacggtatggacgtctggggccaagggaccacggtcaccgtctcctca

SEQ ID NO: 11096 - DNA, 375 bp, Homo sapiens; identical to SEQ ID NO: 11095

SEQ ID NO: 11097 - DNA, 375 bp, Homo sapiens; identical to SEQ ID NO: 11095

SEQ ID NO: 11098 - DNA, 362 bp, Homo sapiens
ggtgcagctacagcagtggggcgcaggactgttgaagccttcggagaccctgtccctcacctgcgctgtctatggtgggtccttcagtagttactactggcactggatccgccagcccccagggaaggggctggagtggattggggaaatcaatcatagtggaagcaccaactacaacccgtccctcaagagtcgagtcaccatttcaccagacacgtccaagaaccagttctccctgaagctgacctctgtgaccgccgcggacacggctgtatattactgttcgagaaccagactacggtggcagccccataatgcttttgatatctggggccaagggacaatggtcaccgtctcttcag

SEQ ID NO: 11099 - DNA, 364 bp, Homo sapiens
caggtgcagctacagcagtggggcgcaggactgttgaagccttcggagaccctgtccctcacctgcgctgtctatggtgggtccttcagtagttactactggcactggatccgccagcccccagggaaggggctggagtggattggggaaatcaatcatagtggaagcaccaactacaacccgtccctcaagagtcgagtcaccatttcaccagacacgtccaagaaccagttctccctgaagctgacctctgtgaccgccgcggacacggctgtatattactgttcgagaaccagactacggtggcagccccataatgcttttgatatctggggccaagggacaatggtcaccgtctcttcag

SEQ ID NO: 11100 - DNA, 364 bp, Homo sapiens
caggtgcagctacagcagtggggcgcaggactgttgaagccttcggagaccctgtccctcacctgcgctgtctatggtgggtccttcagtagttactactggcactggatccgccagcccccagggaaggggctggagtggattggggaaatcaatcatagtggaagcaccaactacaacccgtccctcaagagtcgagtcaccatttcaccagacacgtccaagaatcagttctccctgaagctgacctctgtgaccgccgcggacacggctgtatattactgttcgagaaccagactacggtggcagccccataatgcttttgacatctggggccaagggacaatggtcaccgtctcttcag

SEQ ID NO: 11101 - DNA, 376 bp, Homo sapiens
cagctgcagctgcaggagtcgggcccaggactggtgaagccttcggagaccctgtccctcacctgcactgtctctggtggctccatcagcagtaccggttactactggggctggatccgccagccccccgaagaggggctggaatggattgcaattatctattatagtgggaacacttaccacaacccgtccctcaagagtcgactcaccatatccgtggacacgtccaagaaccaattctccctgaagttaacctctgtgaccgccgcagacacggctgtgtattattgtgcaagactcattggtatggcagtgggtggtaaatggccctactttgactcctggggccagggaaccctggtcaccgtctcctcag

SEQ ID NO: 11102 - DNA, 376 bp, Homo sapiens; identical to SEQ ID NO: 11101

SEQ ID NO: 11103 - DNA, 376 bp, Homo sapiens; identical to SEQ ID NO: 11101

SEQ ID NO: 11104 - DNA, 391 bp, Homo sapiens
caggtacagctgcaacagtcaggtccaggactggtgaagccctcgcagaccctgttactcacctgtgccatctccggggacagtgtctctaggaaaagtgttgcttggaactggatcaggcagtccccatcgagaggccttgagtggctgggaaggacatactacagctccaagtggtataatgattatgcagtgtctgtgaaaagccgaataaccatcaacccagacacatccaagaaccagttctccctgcacctgagttctgtgactcccgacgacacggctgtctattactgtgcaagagatcggcacgatattgtagtggtgatggctgcagaggaagcccggttcgacccctggggccagggaaccctggtcaccgtctcctcag

SEQ ID NO: 11105 - DNA, 220 bp, Homo sapiens
aagtggtatagtgattatgcagtgtctgtgaaaagtcgaataaccatcaacccagacacatccaagaaccagttctccctgcacctgaattctgtgactcccgaggacacggctgtctattactgtgcaagagatcggcacgatattgtagtgatgatggctgcagaggaagcccggttcgacccctggggccagggaaccctggtcaccgtctcctcag

SEQ ID NO: 11106 - DNA, 391 bp, Homo sapiens
caggtacagctgcagcagtcaggaccaggactggtgaagccctcgcagaccctcttactcacctgtgccatctccggggacagtatctctagaaaaagtgttgcttggaactggatcaggcagtccccatcgagaggccttgagtggctgggaaggacattctacagctccaagtggtatagtgattatgcagtgtctgtgaaaagtcgaataaccatcaacccagacacatccaagaaccagttctccctgcacctgaattctgtgactcccgaggacacggctgtctattactgtgcaagagatcggcacgatattgtagtgatgatggctgcagaggaagcccggttcgacccctggggccagggaaccctggtcaccgtctcctcag

SEQ ID NO: 11107 - DNA, 370 bp, Homo sapiens
caggtacagctgcagcagtcaggtccaggactgctgaagccctcgcagaccctcttactcacctgtgccatctccggggacagtgtctctagcaacagtgctgcttggaactggatcaggcagtccccatcgagaggccttgagtggctgggaaggacatactacaggtccaagtggtatagtgaatatgcactatctgtgaaaagtcgaataaccatcagttcagacacacccaagaaccagttttccctgcagctgaactctgtgactcccgaggacacggctgtgtattactgtgcgaaagatctacttggcgattcaactggaaggacccactggggcctgggaaccctggtcaccgtctcctcag

SEQ ID NO: 11108 - DNA, 370 bp, Homo sapiens
caggtacagctgcagcagtcaggtccaggactgctgaagccctcgcagaccctcttactcacctgtgccatctccggggacagtgtctctagcaacagtgctgcttggaactggatcaggcagtccccatcgagaggccttgagtggctgggaaggacatactacaggtccaagtggtatagtgaatatgcagtatctgtgaaaagtcgaataaccatcaattcagacacacccaagaaccagttttccctgcagctgaactctgtgactcccgaggacacggctgtgtattactgtgcaagagatctacttggcgattcaactggaaggacccactggggcctgggaaccctggtcaccgtctcctcag

SEQ ID NO: 11109 - DNA, 390 bp, Homo sapiens
caggtgcagctgcaggagtcgggcccaggactggtgaagccttcggagaccctgtccctcacctgcactgtctctggtggccccatcagtagttactactggagctggatccggcagcccccagggaagggactggagtggattgggtatatcttttacagtgggagcaccagctacaacccctccctcaagagtcgagtgaccatatcagtagacacgtccaagaaccagttctccctgaagctgagctctgtgaccgctgcggacacggccgtgtattactgtgcgagaggcctcttattccggtattacgatgttttgactgggagttccggccaagactacggtatggacgtctggggccaagggaccacggtcaccgtctcctca

SEQ ID NO: 11110 - DNA, 390 bp, Homo sapiens
caggtgcagctgcaggagtcgggcccaggactggtgaaggcttcggagaccctgtccctcacctgcagtgtctctggtggctccatcagtagttactactggagttggatccggcagcccccagggaagggactggagtggattgggtatatctattacagtgggagcaccaactacaacccctccctcaagagtcgagtcaccatatcagtagacacgtccaagaaccagttctccctgaagttgagctctgtgaccgctgcggacacggccgtgtattactgtacgagaggcctcttatttcggtattatgatattttgactgggagttccggccaagactacggtatggacgtctggggccaagggaccacggtcaccgtctcctca

SEQ ID NO: 11111 - DNA, 364 bp, Homo sapiens
caggtgcagctggtgcagtctggggctgaggtgaagaagcctgggtcctcggtgaaggtctcctgcaaggcttctggaggcaccttcagcagctatgctatcagctgggtgcgacaggcccctggacaagggcttgagtggatgggagggatcatccctatctttggtacagcaaactacgcacagaagttccagggcagagtcacgattaccgcggacgaatccacgagcacagcctatatggagctgagcagcctgagatctgaggacacggccgtgtattactgtgcgagagatagtggtagagatggctacaaaaacattgactactggggccagggaaccctggtcaccgtctcctcag

SEQ ID NO: 11112 - DNA, 364 bp, Homo sapiens; identical to SEQ ID NO: 11111

SEQ ID NO: 11113 - DNA, 364 bp, Homo sapiens
gagatgcagctggtgcagtctggagcagaggtgaaaaagcccggggagtctctgaaaatctcctgtaagggttctggaaacacctttaccagttactggatcgcctgggtgcgccaggtgcccggaaaaggcctggagtggatggggaccatctatcctggtgactctgataccaaatacagcccgtcctttcaaggccaagtcaccatgtcagccgacaggtccatcaacaccgcctacctgcagtggagcagcctgaaggcctcggacaccgccatgtattactgtgggagacagggaggagtggctacccttagatacttagacttgtggggccagggaaccctggtcaccgtctcctcag

SEQ ID NO: 11114 - DNA, 364 bp, Homo sapiens
gagatgcagctggtgcagtctggagcagaggtgaaaaagcccggggagtctctgaaaatctcctgtaagggttctggaaacacctttaccagttactggatcgcctgggtgcgccaggtgcccggaaaaggcctggagtggatggggaccatctatcctggtgactctgataccaaatacagcccgtcattccaaggccaagtcaccatgtcagccgacaggtccatcaacaccgcctacctgcagtggagcagcctgaaggcctcggacaccgccatgtattactgtgggagacagggaggagtggctacccttagatacttagacttgtggggccagggaaccctggtcaccgtctcctcag

SEQ ID NO: 11115 - DNA, 364 bp, Homo sapiens
caggtgcagctggtgcagtcgggggctgaggtgaagaagcctggggcctcagtgaaggtctcctgcaaggcttctggatacaccttcaccacttatgatatcaactgggtgcgacaggccactggacaaggccttgagtggatgggatggatgaaccctaacagtggtaacacaggatactcacaggcatttcagggcagagtcaccatgaccagggacacctccataagcacagcctacatggagctgagcaacctgagatctgaggacacggccgtatattactgtacgagaagtctgtatgaaaaaagtgatttggactttgactattggggccagggaaccctggtcaccgtctcctcag

SEQ ID NO: 11116 - DNA, 364 bp, Homo sapiens
caggtgcagctggtgcagtctggggctgaggtgaagaagcctggggcctcagtgaaggtctcctgcaaggcttctggatacaccttcaccacttatgatatcaactgggtgcgacaggccactggacaaggccttgagtggatgggatggatgaaccctaacagtggtaacacagggtatgcacagaagttccagggcagagtcaccatgaccagggacacctccataagcacagcctacatggagctgagcaacctgagatctgaggacacggccgtgtattactgtacgagaagtctgtatgaaaaaagtgatttggactttgactactggggccagggaaccctggtcaccgtctcctcag

SEQ ID NO: 11117 - DNA, 369 bp, Homo sapiens
caggtgcagctggtgcagtctggggctgaagtgaagaagcctgggtcctcggtgaaggtctcctgcagggcttctgggggcagcttcagcaactatgctatgaactgggtgcgacaggcccctggacaagggcttgagtggatgggagggatcatccctctctttggtacagcaaactacgcacagaagttccagggcagagtcacgattaccgcggacgaatccacgagcacagcctacatggatctgagcaccctgagatctgaggacacggccgtgtattactgtgcgagaggattgacttatcgttaccctcagaggaccgctatggacgtctggggccaagggaccacggtcaccgtctcctca

SEQ ID NO: 11118 - DNA, 369 bp, Homo sapiens
caggtgcagctggtgcagtctggggctgaagtgaagaagcctgggtcctcggtgaaggtctcctgcagggcttctgggggcagcttcaccaactttgctatgaactgggtgcgacaggcccctggacaagggcttgagtggatgggagggatcatccctctctttggtacagcaaactacccacagaagttccagggcagagtcacgattaccgcggacgaatccacgaacacagcctacatggatcttagcaccctgagatctgaggacacggccgtgtattattgtgcgagaggattgacttatcgttatcctcagaggaccgctatggacgtctggggccaagggaccacggtcaccgtctcctca

SEQ ID NO: 11119 - DNA, 369 bp, Homo sapiens
caggtgcagctgcaggagtcgggcccaggactggtgaagccttcggagaccctgtccctcacctgcactgtctctggtggctccatcaggagttactactggagctggatccggcagcccccagggaagggactggagtggattgggtatatctattacagtgggagcaccaactacaacccctccctcaagagtcgagtcaccatatcagtagacacgtccaagaaccagttctccctgaaactgagctctgtgatcgctgcggacacggccgtgtattactgtgcgagatgcggcagcagctggcaaaactactactactacggtttggacgtctggggccaagggaccacggtcaccgtctcctca

SEQ ID NO: 11120 - DNA, 369 bp, Homo sapiens
caggtgcagctgcaggagtcgggcccaggactggtgaagccttcggagaccctgtccctcacctgcactgtctctggtggctccatcagtagttactactggagctggatccggcagcccccagggaagggactggagtggattgggtatatctattacagtgggagcaccaactacaacccctccctcaagagtcgagtcaccatatcagtatacacgtccaagaaccagttctccctgaagctgagctctgtgaccgctgcggacacggccgtgtattactgtgcgagatgcggcagcagctggcaaaactactactactacggtatggacgtctggggccaagggaccacggtcatcgtctcctca

SEQ ID NO: 11121 - DNA, 381 bp, Homo sapiens
cagctgcagctgcaggagtcgggcccaggactggtgaagccttcggagaccctgtccctcacctgcactgtctctggtggctccatcagcagtagtagttactactggggctggatccgccagcccccagggaaggggctggagtggattgggagtatctattttagtgggagcacctactccaacccgtccctcaagagtcgagtcaccatatccgtagacacgtccaataaccagttctccctgaggctgagctctgtgaccgccgcagacacggctgtgtattactgtgcgagacaccgatcgtatagcactggctggtctgaagactcctatggtatggacgtctggggccaagggaccacggtcaccgtctcctca

SEQ ID NO: 11122 - DNA, 381 bp, Homo sapiens; identical to SEQ ID NO: 11121

SEQ ID NO: 11123 - DNA, 352 bp, Homo sapiens
gaggtgcagctggtggagtctggaggaggcttgatccagcctggtgggtccctgagactctcctgtgcagcctctgaaattatcgtcagtagcaactacatgaattgggtccgccaggctccagggaaggggctggagtgggtctcagttatttatcccggtggtagcacattctacgcagactccgtgaggggccgattcaccatctccagagacatttccaggaacacgatgtatcttcaaatgaaaagcctgagagccgaggatacggccgtatatttctgtgcgagaggcccgtttgagttcgggttcgacccctggggccagggaaccctggtcaccgtctccacag

SEQ ID NO: 11124 - DNA, 348 bp, Homo sapiens
gaggtgcaactggtggagtctggaggaggcttgatccagcctggggggtccctgagactctcctgtgcagcctctgaaattatcgtcagtagcaactacatgaattgggtccgccaggctccagggaaggggctggagtgggtctcagttacttatcccggtggtagctcattctacgcagactccgtgaggggccgattcaccatctccagagacagttccaagaacacggtgtatcttcaaatgaaaaacctgggagccgaggatacggccgtatatttctgtgcgagaggcccgtttgagttcgggttcgacccctggggccagggaaccctggtcaccgtctcc

SEQ ID NO: 11125 - DNA, 346 bp, Homo sapiens
caggtgcagctgcaggagtcgggcccaggactggtgaagccttcggggaccctgtccctcacctgcgctgtctctggtggctccatcagtagtagtaactggtggagttgggtccgccagcccccagggaaggggctggagtggattggggaaatctatcatagtgggagcaccaactacaacccgtccctcaagagtcgagtcaccatatcagtggacaagtccaagaaccagttctccctgaaactgaactctgtgaccgccgcggacacggccgtgtattattgtgcgagggggtggtactttgactactggggccagggaaccctggtcaccgtctcctcag

SEQ ID NO: 11126 - DNA, 346 bp, Homo sapiens
caggtgcagctgcaggagtcgggcccaggactggtgaagccttcggggaccctgtccctcacctgcgctgtctctggtggctccatcagcagtaataactggtggagttgggtccgccagcccccagggaagggtctggagtggattggggaaatctatcatagtgggaacaccaactacagcccgtccctcaagagtcgagtcaccatatcagtagacaagtccaagaaccagttctccctgaagctgagctctgtgaccgccgcggacacggccgtgtattactgtgcgagaggctggaacttcgactactggggccagggaaccctggtcaccgtctcctcag

SEQ ID NO: 11127 - DNA, 382 bp, Homo sapiens
caggtgcagctggtgcagtctggggctgaggtgaagaagcctgggtcctcggtgaaggtctcctgcacggcttctgtaagcaccttcagcaactatgctatcagctgggtgcgacaggcccctggacaagggcttgagtggctgggagggatcatccctatctttcgtacggcaaactacgcacagaagttccagggcagagtcacgattaccgcggacgaatccacgagcacagcctacatggagctgagcagcctgagatctgaggacacggccgtgtattactgtgcgagacattactatggttcggggagttattataaccgagacgatgatgcttttgatatctggggccaagggacaatggtcaccgtctcttcag

SEQ ID NO: 11128 - DNA, 382 bp, Homo sapiens
caggtgcagctggtgcagtctggggctgaggtgaagaagcctgggtcctcggtgaaggtctcctgcaaggcttctggaggcaccttcagcaactatgctatcagctgggtgcgacaggcccctggacaagggcttgagtggatgggagggatcatccctatctttggtacagcaaagtacgcacagaagttccagggcagagtcacgattaccacggacgaatccacgagcacagcctacatggagttgagcagcctgagatctgaggacacggccgtgtattattgtgcgagacattactatggttcggggagttattataaccgagacgatgatgcttttgatatctggggccaagggacaatggtcaccgtctcttcag

SEQ ID NO: 11129 - DNA, 361 bp, Homo sapiens
gaggtgcagctggtggagtccgggggaggcttagttcagcctggggggtccctgagactctcctgtgcagcctctggattcaccttcagtagctactggatgcactgggtccgccaagctccagggaaggggctggtgtgggtctcacgtattaatagtgatgggagtagcacaagctacgcggactccgtgaagggccgattcaccatctccagagacaacgccaagaacacgctgtatctgcaaatgaacagtctgagagccgaggacacggctgtgtattactgtgcaagaacatacgatttttggagtggctccattgactactggggccagggaaccctggtcaccgtctcctcag

SEQ ID NO: 11130 - DNA, 361 bp, Homo sapiens
gaggtgcagctggtggagtctgggggaggcctggtcaagcctggggggtccctgagactctcctgtgcagcctctggattcaccttcagtagctatagcatgaactgggtccgccaggctccagggaaggggctggagtgggtctcatccattagtagtagtagtagttacatatactacgcagactcagtgaagggccgattcaccatctccagagacaacgccaagaactcactgtatctgcaaatgaacagcctgagagccgaggacacggctgtgtattactgtgtggcgtattacgatttttggagtggttattatgatcactggggccagggaaccctggtcaccgtctcctcag

SEQ ID NO: 11131 - DNA, 361 bp, Homo sapiens
gaggtgcagctattggaatctgggggaggcttggtacagcctggggggtccctgagactctcctgtgcagcctctggattcacctttagcaactatgccatgagttgggtccgccaggctccggggaaggggctggaatgggtctcagctcttactggtagtggtggtagcacatactacgcagactccgtgaagggccggttcaccatctccagagacaattccaagaagacgctgtatctgcaaatgaacagcctaagagccgaggacacggccgtatattactgtgcgaaagaaggggtatacaactggaacgacgtggacttctggggccagggaaccctggtcaccgtctcctcag

SEQ ID NO: 11132 - DNA, 361 bp, Homo sapiens
caggtccagcttgtgcagtctggggctgaggtgaagaagcctggggcctcagtgaaggtttcctgcaaggcttctggatacaccttcactagctatgctatgcattgggtgcgccaggcccccggacaaaggcttgagtggatgggatggatcaacgctggcaatggtaacacaaaatattcacagaagttccagggcagagtcaccattaccagggacacatccgcgagcacagcctacatggagctgagcagcctgagatctgaagacacggctgtgtattactgtgcgagagtttatacagctttggtctcctggttcgacccctggggccagggaaccctggtcaccgtctcctcag

SEQ ID NO: 11133 - DNA, 357 bp, Homo sapiens
caggtgcagctgcaggagtcgggcccaggactggtgaagccttcggagaccctgtccctcacctgcactgtctctggtggctccatcagtagttactactggagctggatccggcagcccgccgggaagggactggagtggattgggcgtatctataccagtgggagcaccaactacaacccctccctcaagagtcgagtcaccatgtcagtagacacgtccaagaaccagttctccctgaagctgagctctgtgaccgccgcggacacggccgtgtattactgtgcgagcgggcgcccggcctactactacggtatggacgtctggggccaagggaccacggtcaccgtctcctca

SEQ ID NO: 11134 - DNA, 352 bp, Homo sapiens
tgcagctggtgcagtctggggctgaggtcaagaagcctggggcctcagtgaaggtctcatgtgaggcttctggatacacattcactaaacatgatatccattgggtgcgtcaggccgctggccgaggcctagagtggatgggttggatgagcccatggcgtgggccctccggatctgcacagaaattcgagtccagactcagtctgaccaggaacacctccattaacacagcctacatggagctccacaacttgacatccgaggacagcgccgtatattattgtgtgaggtttgacgagatcaacgtctacgctttggacctctggggccaagggacctcggtcaccgtctc

SEQ ID NO: 11135 - DNA, 358 bp, Homo sapiens
gaggtgcagctggtggagtctggaggaggcttgatccagcctggggggtccctgagactctcctgtgcagcctctgggttctccgtcagtagcaactacatgagctgggtccgccaggctccagggaaggggctggagtgggtctcagttatttatagcggtggtagtacatactacgcagactccgtgaagggccgcttcaccatctccagagacaattccaggaacacggtgtatcttcaaatgaacagcctgagagccgaggacacggccgtgtattactgtgcgagaggatgggtgactacactacgtggggctgactgctggggccagggaaccctggtcaccgtgtcctcag

SEQ ID NO: 11136 - DNA, 357 bp, Homo sapiens
caggtgcagctacagcagtggggcgcaggactgttgaagccttcggagaccctgtccctcacctgcactgtctctggtggctccatcagtagttactactggagctggatccggcagcccccagggaagggactggagtggattgggtatatctattacagtgggagcaccaactacaacccctccctcaagagtcgagtcaccatatcagtagacacgtccaagaaccagttctccctgaagctgagctctgtgaccgctgcggacacggccgtgtattactgtgcgagagtcctcgtcggctactactacggtatggacgtctggggccaagggaccacggtcaccgtctcctca

SEQ ID NO: 11137 - DNA, 367 bp, Homo sapiens
gaggtgcagctggtggagtctgggggaggcttggtccagcctggagggtccctgaaactctcctgtgtggcctctggattcaccttcagtgaccactacatggactgggtccgccaggttccagggaagggcctggagtgggttggccgtattagaaacaaagttaacaggtacaccacagaatacgccgcgtcagtgaaaggcagattcatcatctcaagagatgattcacagaactcactgtatctgcaaatgaacagcctgaaaaccgaggacacggccgtgtattattgtgctagagggagtgggacgacggatgaattcttccaccactggggccagggcaccctggtcatcgtctcctcag

SEQ ID NO: 11138 - DNA, 361 bp, Homo sapiens
caggtgcagctggtggagtctgggggaggcgtggtccagcctgggaggtccctgagactctcctgtgcagcctctggattcaccttcagtagctatggcatgcactgggtccgccaggctccaggcaaggggctggagtgggtggcagttatatcatatgatggaagtaataaatactatgcagactccgtgaagggccgattcaccatctccagagacaattccaagaacacgctgtatctgcaaatgaacagcctgagagctgaggacacggctgtgtattactgtgcgaaagacgggagtgggagctactatggatcctactactggggccagggaaccctggtcaccgtctcctcag

SEQ ID NO: 11139 - DNA, 361 bp, Homo sapiens
gaggtgcagctggtggagtctgggggaggcttggtacagcctggggggtccctgagactctcctgtgcagcctctggattcaccttcagtagctatagcatgaactgggtccgccaggctccagggaaggggctggagtgggtttcatacattagtagtagtagtagtaccatatactacgcagactctgtgaagggccgattcaccatctccagagacaatgccaagaactcactgtatctgcaaatgaacagcctgagagccgaggacacggctgtgtattactgtgcgtgcgacagcagctggtattacgatgcttttgatatctggggccaagggacaatggtcaccgtctcttcag

SEQ ID NO: 11140 - DNA, 364 bp, Homo sapiens
cagatcaccttgaaggagtctggtcctacgctggtgaaacccacacagaccctcacgctgacctgcaccttctctgggttctcactcagcactagtggagtgggtgtgggctggatccgtcagcccccaggaaaggccctggagtggcttgcactcatttattgggatgatgataagcgctacagcccatctctgaagggcaggctcaccatcaccaaggacacctccaaaaaccaggtggtccttacaatgaccaacatggaccctgtggacacagccacatattactgtgcacacagctccgactacggtgaccttccctttgactactggggccagggaaccctggtcaccatctcctcag

SEQ ID NO: 11141 - DNA, 396 bp, Homo sapiens
cagctgcagctgcaggagtcgggcccaggactggtgaagccttcggagaccctgtccctcacctgcactgtctctggtggctccatcagcagtagtagttactactggggctggatccgccagcccccagggaaggggctggagtggattgggagtatctattatagtgggagcacctactataacccgtccctcaagagtcgagtcaccatatccgtagacacgtccaagaaccagttctccctgaagctgagctctgtgaccgccgcagacacggctgtgtattactgtgcgagtttgtcccaccgatattgtagtggtggtagctgctacccggttgcgcctaagtacggtatggacgtctggggccaagggaccacggtcaccgtctcctca

SEQ ID NO: 11142 - DNA, 375 bp, Homo sapiens
gaggtgcagctggtggagtctgggggaggcctggtcaagcctggggggtccctgagactctcctgtgcagcctctggattcaccttcagtagctatagcatgaactgggtccgccaggctccagggaaggggctggagtgggtctcatccattagtagtagtagtagttacatatactacgcagactcagtgaagggccgattcaccatctccagagacaacgccaagaactcactgtatctgcaaatgaacagcctgagagccgaggacacggctgtgtattactgtgcgagagatcatcctagtggctacgacccttactactactacggtatggacgtctggggccaagggaccacggtcaccgtctcctca

SEQ ID NO: 11143 - DNA, 375 bp, Homo sapiens
gaggtgcagctggtggagtccgggggaggcttagttcagcctggggggtccctgagactctcctgtgcagcctctggattcaccttcagtagctactggatgcactgggtccgccaagctccagggaaggggctggtgtgggtctcacgtattaatagtgatgggagtagcacaagctacgcggactccgtgaagggccgattcaccatctccagagacaacgccaagaacacgctgtatctgcaaatgaacagtctgagagccgaggacacggctgtgtattactgtgcaagggaatacgtattacgatattttgactggttttcctacggtatggacgtctggggccaagggaccacggtcaccgtctcctca

SEQ ID NO: 11144 - DNA, 342 bp, Homo sapiens
caggtccagctggtacagtctggggctgaggtgaagaagcctggggcctcagtgaaggtctcctgcaaggtttccggatacaccctcactgaattatccatgcactgggtgcgacaggctcctggaaaagggcttgagtggatgggaggttttgatcctgaagatggtgaaacaatctacgcacagaagttccagggcagagtcaccatgaccgaggacacatctacagacacagcctacatggagttgagcagcctgagatctgaggacacggccgtgtattactgtgcaacagagactatggacgtctggggccaagggaccacggtcaccgtctcctca

SEQ ID NO: 11145 - DNA, 340 bp, Homo sapiens
gaggtgcagctggtggagtctggaggaggcttgatccagcctggggggtccctgagactctcttgtgcagcctctgggctcaccgtcgatagcgtctacatgagctgggtccgccaggctccagggaaggggctggaatgggtctcgatcatttataccagtggaaccacatactacgcagactccgtgcagggccgattcaccacctccagagacacttccaggaacatgctgtatcttcaaatgaacaacctgagagccgacgacacggccgtttattactgttccttggagacattcgactactggggccagggaaccctggtcatcgtctcctcag

SEQ ID NO: 11146 - DNA, 360 bp, Homo sapiens
gaggtgcagctggtggagtctgggggagactttgtacagcctggggggtccctgagactctcctgtgcagcctctggattcgtcttcagtagctataacatgaactgggtccgccaggctccagggaaggggctggagtggctttcatatattagtagtagtagtaccgccatatattacgcagactctgtgaagggccgattcaccgtctccagagagaatgccaagaactcactgtatctgcaactgaacagcctgagagacgaggacacggctatttattactgtgcgagagtgccgtactacaatattttgacgtttgactactggggccagggaaccctggtcaccgtctcctca

SEQ ID NO: 11147 - DNA, 361 bp, Homo sapiens
gaggtgcagctggtggagtctgggggaggcttgatacagcctggggggtccctgagactctcctgtgcagcctctggattcaccttcagtagctatagcatgaactgggtccgccaggctccagggaaggggctggagtggctgtcatacattagtagtagtagtagtaacatatactacgcagactctgtgaagggccgattcaccatctccagagacaatgccaagaactcactgtatctgcaaatgaacagcctgagagccgaggacacggctgtgtattactgtgcgagagacggggtgggagctacccattacattgactactggggccagggaaccctggtcaccgtctcctcag

SEQ ID NO: 11148 - DNA, 372 bp, Homo sapiens
gaggtgcagctggtggagtctggaggaggcttgatccagcctggggggtccctgagactctcctgtgcagcctctgggttcaccgtcagtagcaactacatgagctgggtccgccaggctccagggaaggggctggagtgggtctcagttatttatagcggtggtagcacatactacgcagactccgtgaagggccgattcaccatctccagagacaattccaagaacacgctgtatcttcaaatgaacagcctgagagccgaggacacggccgtgtattactgtgcgagagaagaggtgactacgcccccatactactactactacggtatggacgtctggggccaagggaccacggtcaccgtctcctca

SEQ ID NO: 11149 - DNA, 375 bp, Homo sapiens
gaagtgcagctggtggagtctgggggaggcttggtacagcctggcaggtccctgagactctcctgtgcagcctctggattcacctttgatgattatgccatgcactgggtccggcaagctccagggaagggcctggagtgggtctcaggtattagttggaatagtggtagcataggctatgcggactctgtgaagggccgattcaccatctccagagacaacgccaagaactccctgtatctgcaaatgaacagtctgagagctgaggacacggccttgtattactgtgcaaagtccggttcggggagttattacccccactactactacggtatggacgtctggggccaagggaccacggtcaccgtctcctca

SEQ ID NO: 11150 - DNA, 375 bp, Homo sapiens
caggtgcagctggtggagtctgggggaggcgtggtccagcctgggaggtccctgagactctcctgtgcagcctctggattcaccttcagtagctatggcatgcactgggtccgccaggctccaggcaaggggctggagtgggtggcagttatatggtatgatggaagtaataaatactatgcagactccgtgaagggccgattcaccatctccagagacaattccaagaacacgctgtatctgcaaatgaacagcctgagagccgaggacacggctgtgtattactgtgcgagagccattcgcccgtattactcaatttactactactacggtatggacgtctggggccaagggaccacggtcaccgtctcctca

SEQ ID NO: 11151 - DNA, 376 bp, Homo sapiens
caggtgcagctggtggagtctgggggaggcgtggtccagcctgggaggtccctgagactctcctgtgcagcgtctggattcaccttcagtagctatggcatgcactgggtccgccaggctccaggcaaggggctggagtgggtggcagttatatggtatgatggaagtaataaatactatgcagactccgtgaagggccgattcaccatctccagagacaattccaagaacacgctgtatctgcaaatgaacagcctgagagccgaggacacggccgtgtattactgttcgagagggtttagcagtggctgggacaccctcctcaatgatgcttttgatatctggggccaagggacaatggtcaccgtctcttcag

SEQ ID NO: 11152 - DNA, 375 bp, Homo sapiens
caggtgcagctggtgcagtctggggctgaggtgaagaagcctggggcctcagtgaaggtctcctgcaaggcttctggatacaccttcaccggctactatatgcactgggtgcgacaggcccctggacaagggcttgagtggatgggatggatcaaccctaacagtggtggcacaaactatgcacagaagtttcagggctgggtcaccatgaccagggacacgtccatcagcacagcctacatggagctgagcaggctgagatctgacgacccggccgtgtattactgtgcgcggggggggccctcagcagctccttactactactactacggtatggacgtctggggccaagggaccacggtcaccgtctcctca

SEQ ID NO: 11153 - DNA, 372 bp, Homo sapiens
caggtgcagctgcaggagtcgggcccaggactggtgaagccttcggagaccctgtccctcacctgcactgtctctggtggctccatcagtagttactactggagctggatccggcagcccccagggaagggactggagtggattgggtatatctattacagtgggagcaccaactacaacccctccctcaagagtcgagtcaccatatcagtagacacgtccaagaaccagttctccctgaagctgagctctgtgaccgctgcggacacggccgtgtattactgtgcgagagaggtcggcagtggctggtcatcgaggtactactacggtatggacgtctggggccaagggaccacggtcaccgtctcctca

SEQ ID NO: 11154 - DNA, 361 bp, Homo sapiens
caggtgcagctggtgcagtctggggctgaggtgaagaagcctgggtcctcggtgaaggtctcctgcaaggcttctggaggcaccttcagcagctatgctatcagctgggtgcgacaggcccctggacaagggcttgagtggatgggagggatcatccctatctttggtacagcaaactacgcacagaagttccagggcagagtcacgattaccgcggacgaatccacgagcacagcctacatggagctgagcagcctgagatctgaggacacggccgtgtattactgtgcgtccggatacagctatggcttgtactactttgactactggggccagggaaccctggtcaccgtctcctcag

SEQ ID NO: 11155 - DNA, 361 bp, Homo sapiens
caggtgcagctggtgcagtctggggctgaggtgaagaagcctgggtcctcggtgaaggtctcctgcaaggcttctggaggcaccttcagcagctatgctatcagctgggtgcgacaggcccctggacaagggcttgagtggatgggagggatcatccctatctttggtacagcaaactacgcacagaagttccagggcagagtcacgattaccgcggacaaatccacgagcacagcctacatggagctgagcagcctgagatctgaggacacggccgtgtattactgtgcgagagatggggccttaagtgaccactactttgactactggggccagggaaccctggtcaccgtctcctcag

SEQ ID NO: 11156 - DNA, 379 bp, Homo sapiens
caggtgcagctgcaggagtcgggcccaggactggtgaagccttcacagaccctgtccctcacgtgcactgtctctggtggctccatcagcagtggtagttattactggaactggatccggcagcccgccgggaagggactggagtggattgggcgcatctatgccagtgggagcaccaactacaatgcctccctccagagtcgagccaccatgtcagtagacacgtccaagaatcagttctccctgaagctcagctctgtgaccgccgcagacacggccgtgtattactgtgcgagagggtattacgatttttggagtggatctttttcggctcagatagacctctggggccagggaaccctggtcaccgtgtcctcag

SEQ ID NO: 11157 - DNA, 371 bp, Homo sapiens
caggtgcacccacagcagtggggcgcaggcctgttgaagcctccggagaccctgtccctcacctgcgccgtgtatggtgggccctccaatgaccacaattggggttggacccgccagcccccagggaaggggctggaatgaattggaaaaatcagtctgagtggaagcaccaattacaatttgtccctcaagagtcgaggcaatagaaccatagggcacgccgaagacttaattgtccctggaggtgatttccgtgaccgccgcggacacgggtgcacattactgtgcgagaggattggtagcccgagatgactccggtgccagtaactgaatcgacccctggggccagggaaccctggtcaccgtctcct

SEQ ID NO: 11158 - DNA, 379 bp, Homo sapiens
cagatcaccttgaaggagtctggccctacgctggtgaatcccacacagaccctcaccctgacctgttcgttctctgggttctcactcaccactagtggagggggtgtgggctggatccgccagcccccaggagaggccctggaatggcttgcagtcatttattgggataatgatgaccgttacagtccatctctgaggagcaggctcaccaccaccaaggacacctccaagaaccaggcgttcctcacaatgaccaacatggaccctgtcgacacaggcacatattactgtgcacacgttgtgataacctttgggggagttatgagactagatgcttttgatgtctggggcccaggggcaacggtcatcgtctcttcag

SEQ ID NO: 11159 - DNA, 376 bp, Homo sapiens
gaggtgcagctggtggagtccgggggaggcttagttcagcctggggggtccctgagactctcctgtgcagcctctggattcaccttcagtagctactggatgcactgggtccgccaagctccagggaaggggctggtgtgggtctcacgtattaatagtgatgggagtagcacaagctacgcggactccgtgaagggccgattcaccatctccagagacaacgccaagaacacgctgtatctgcaaatgaacagtctgagagccgaggacacggctgtgtattactgtgcaagaggaggggcgtattacgatttttggagtggtccgaactggttcgacccctggggccagggaaccctggtcaccgtctcctcag

SEQ ID NO: 11160 - DNA, 376 bp, Homo sapiens
caggtgcaactggtggagtctgggggaggctcggtcaagcctggagggtccctgagactctcctgtgcagcctctggattcgccttcagtaattactatatggcttggatccgccaggctccagggagggggctggagtggacttcatacattagcggcagtggcagtgacatctactacgcagactctgtgaagggccgattcaccatctccagggacaactccaagaactcactgtatctacaaatgaacaacctgcgagccgaggacacggccgtctattactgtgcgagagatttgtggttcgaggactatgtcgggcggggggtctggttcgactcctggggccagggaatgctggtcaccgtctcctcag

SEQ ID NO: 11161 - DNA, 376 bp, Homo sapiens
caggtgcagctggtgcagtctggggctgaggtgaagacgcctggggcctcagtgaaggtctcctgcaagacttctggatacaccttcaccgactactatatacactgggtgcgacaggcccctggacaagggcttgagtggatgggatggctcaaccctatgagtggtgccacaaactatgcacagaactttcagggcagggtcaccatgaccagggacacgtccatcaccacagcctacatggaactgagcaggctgacatctgacgacacggccgtatattactgtgccagagacccgggtataggagtggctggtagtctacagtacgcttttgatatgtggggccaagggacaatggtcaccgtctcttcag

SEQ ID NO: 11162 - DNA, 376 bp, Homo sapiens
gaagtgcagctggtggagtctgggggaggcttggtacagcctggcaggtccctgagactctcctgtgcagcctctggattcacctttgatgattatgccatgcactgggtccggcaagctccagggaagggcctggagtgggtctcaggtattagttggaatagtggtagcataggctatgcggactctgtgaagggccgattcaccatctccagagacaacgccaagaactccctgtatctgcaaatgaacagtctgagagctgaggacacggccttgtattactgtgcaaaaggggggcttatgtggttcggggagttattaacatactactttgactactggggccagggaaccctggtcaccgtctcctcag

SEQ ID NO: 11163 - DNA, 376 bp, Homo sapiens
gaagtgcagctggtggagtctgggggaggcttggtacagcctggcaggtccctgagactctcctgtgcagcctctggattcacctttgatgattatgccatgcactgggtccggcaagctccagggaagggcctggagtgggtctcaggtattagttggaatagtggtagcataggctatgcggactctgtgaagggccgattcaccatctccagagacaacgccaagaactccctgtatctgcaaatgaacagtctgagagctgaggacacggccttgtattactgtgcaaaaggagattacgtttgggggagttatcgttaccccgtttggtttgactactggggccagggaaccctggtcaccgtctcctcag

SEQ ID NO: 11164 - DNA, 373 bp, Homo sapiens
caggtgcagctgcaggagtcgggcccaggactggtgaagccttcggagaccctgtccctcacctgcactgtctctggtggctccatcagtagttactactggagctggatccggcagcccccagggaagggactggagtggattgggtatatctattacagtgggagcaccaactacaacccctccctcaagagtcgagtcaccatatcagtagacacgtccaagaaccagttctccctgaagctgagctctgtgaccgctgcggacacggccgtgtattactgtgcgagagtcggcggtcgatattgtagtggtggtagctgtaactggttcgacccctggggccagggaaccctggtcaccgtctcctcag

SEQ ID NO: 11165 - DNA, 379 bp, Homo sapiens
caggtgcagctgcaggagtcgggcccaggactggtgaagccttcacagaccctgtccctcacctgcactgtctctggtggctccatcagcagtgatgtttaccactggggctggatccgccagcacccagggaagggcctggagtggattgggtacatctattacagtgggagtacctactacaacccgtccctcacgagtcgagttactttgtcaatagacacgtctgagaaccagttctccctgaagatgagctctgtgactgccgcggacacggccgtctattactgtgcgagagtccggaggattggtggctacggtgactccgctgaatacttccagcactggggccagggctccctggtcaccgtctcctcag

SEQ ID NO: 11166 - DNA, 376 bp, Homo sapiens
caggtccagcttgtgcagtctggggctgaggtgaagaagcctggggcctcagtgaaggtttcctgcaaggcttctggatacaccttcactagctatgctatgcattgggtgcgccaggcccccggacaaaggcttgagtggatgggatggatcaacgctggcaatggtaacacaaaatattcacagaagttccagggcagagtcaccattaccagggacacatccgcgagcacagcctacatggagctgagcagcctgagatctgaagacacggctgtgtattactgtgcgagagtaaatctatttggctatgatagtagtggttattaccccttggactactggggccagggaaccctggtcaccgtctcctcag

SEQ ID NO: 11167 - DNA, 364 bp, Homo sapiens
gaagtgcagctggtggagtctgggggaggcttggtacagcctggcaggtccctgagactctcctgtgcagcctctggattcaggtttgatgattatggcatgcactgggtccggcaagctccagggaagggcctggagtgggtctcaggtattacttggaatagtggtaagataggctatgcggacactgtgaagggccgattcaccatctccagagacaacgccaagaactccctatatctgcaaatggacagtctgagcgctgaggacacggccttgtattattgtgcaaaagataggacgtcgtatagtacctcgccccttgactactggggccagggaaccctggtcaccgtctcctcag

SEQ ID NO: 11168 - DNA, 364 bp, Homo sapiens
caggtgcagctggtgcagtctggggctgaggtgaagaagcctgggtcctcggtgaaggtctcctgcaaggcttctggaggcaccttcagcagctatgctatcagctgggtgcgacaggcccctggacaagggcttgagtggatgggagggatcatccctatctttggtacagcaaactacgcacagaagttccagggcagagtcacgattaccgcggacgaatccacgagcacagcctacatggagctgagcagcctgagatctgaggacacggccgtgtattactgtgcgagagatttgcgttactatggttcggggaccttcggctactggggccagggaaccctggtcaccgtctcctcag

SEQ ID NO: 11169 - DNA, 379 bp, Homo sapiens
caggtgcagctgcaagagtcgggcccaggactggtgaagccttcggagaccctgtccctcacctgcactgtctctggtggctccatcagcagtagtagttactactggggctggatccgccagcccccagggaaggggctggagtggattggggaaatcaatcatagtggaagcaccaactacaacccgtccctcaagagtcgagtcaccatatccgtagacacgtccaagaaccagttctccctgaagctgagctctgtgaccgccgcggacacggctgtgtattactgtgcgagagggggagggtatagcagctcgtgggttccgtacaactggttcgacccctggggccagggaaccctggtcaccgtctcctcag

SEQ ID NO: 11170 - DNA, 358 bp, Homo sapiens
caggtgcagctgcaggagtcgggcccaggactggtgaagccttcggagaccctgtccctcacctgcactgtctctggtggctccatcagtagctactactggggctggatccggcagtccccagggaggggactggagtggattgggtatatctcttacactgggagcaccgactacaatccttccctcaagagtcgagtcaccatttcagtggacacgtccaagaaccacttctccctgaggttgacctctgtgaccgctgcggacacggccgtgtattactgtgcgagagatggaagggcggctttttcaatatttgactactggggccagggaaccctggtcaccgtttcctcag

SEQ ID NO: 11171 - DNA, 358 bp, Homo sapiens
caggtgcagctgcaggagtcgggcccaggactggtgaagccttcggagaccctgtccctcacctgcactgtctctggtggctccatcagtagttactactggagctggatccggcagcccccagggaagggactggagtggattgggtatatctattacagtgggagcaccaactacaacccctccctcaagagtcgagtcaccatatcagtagacacgtccaagaaccagttctccctgaagctgagctctgtgaccgctgcggacacggccgtgtattactgtgcgagaggattgggtggcgggtcggactggttcgacccctggggccagggaaccctggtcaccgtctcctcag

SEQ ID NO: 11172 - DNA, 358 bp, Homo sapiens
caggtgcagccatagcagtggggcgcaggactgttgaagccttcggagaccctgtccctcacctgcactgtctctcgtggctctatcgctaacaattattggagttggatccggcagcccccagggcagggactggagtggattggatatatcttttacactggggccacgagctacaacccctccctccggagtcgagtcaccatatcaatagacacgtcccagaaccagttctccctgacgctgagctctgtgaccgctgcggacacggccgtgtattattgtgtccgccttcattattatctttcggaggagttcgactcctggggccagggaaccctggtcaccgtctcctcag

SEQ ID NO: 11173 - DNA, 362 bp, Homo sapiens
gaggtgcagctgttggaatctgggggaaacttggtacagccgggggggtccctgcgactctcctgtgcagcctctggattcacctttggcagctatgccatgagctgggtccgccaggctccagggaaggggctggagtgggtctcaagtgttgttggtaatggtgttagcacatattacgcagactccgtgaagggccggttcaccatctccagagacaattccaagaacacggtgtatctgcaaatgaacagcctgagagtcgaggacacggccgtatattactgtgcgaaagatccgtatagtgggagaaactactactttgactactggggccggggaacccaggtcaccgtctcctc

SEQ ID NO: 11174 - DNA, 373 bp, Homo sapiens
caggtacagctgcagcagtcaggtccaggactggtgaagccctcgcagaccctctcactcacctgtgccatctccggggacagtgtctctagcaacagtgctgcttggaactggatcaggcagtccccatcgagaggccttgagtggctgggaaggacatactacaggtccaagtggtataatgattatgcagtatctgtgaaaagtcgaataaccatcaacccagacacatccaagaaccagttctccctgcagctgaactctgtgactcccgaggacacggctgtgtattactgtgcaaaggccaattcgtatagcagtggacacccctttgactactggggccagggaaccctggtcaccgtctcctcag

SEQ ID NO: 11175 - DNA, 364 bp, Homo sapiens
caggtgcagctggtgcagtctggggctgaggtgaagaagcctggggcctcagtgaaggtctcctgcaaggcttctggatacaccttcaccggctactatatgcactgggtgcgacaggcccctggacaagggcttgagtggatgggatggatcagccctatcagtggtggcacaaactatgcacagaactttcagggcagggtcaccatgaccagagacacgtccatcaccacaacctacatggagctgagcaggctgagatctgacgacacggccgtgtattactgtgcgagaagcgattactatagtagtagtgttaaatttgactactggggccagggaaccctggtcaccgtctcctcag

SEQ ID NO: 11176 - DNA, 375 bp, Homo sapiens
gaggtgcagctggtggagtctgggggaggcttggtccagcgggggggtccctgagactctcctgtgcagcctctggattcacctttggtaactattggatgacctgggtccgccaggctccagggaagggactggagtgggtggccaacataaagcaagatggaagtgagaaatactatgtggactctgtgaagggccgattcaccatctccagagacaacgccaagaactcactgtatctgcaaatgaacagcctgagagccgaggacacggctgtatattactgtgcgaaagatcgggcagaaaggtttttggaatacacggttggatattttgactactggggccagggaaccctggtcaccgtctcgtcag

SEQ ID NO: 11177 - DNA, 364 bp, Homo sapiens
gaggtccagctggtacagtctggggctgaggtgaagaagcctggggctacagtgaaaatctcctgcaaggtttctggatacaccttcaccgactactacattcactgggtgcaacaggcccctggaaaagggcttgagtgggtggggcttgttgatcctgaagatggtcaaacaatatccgcagagaagttccagggcagagtcaccataaccgcggacacgtctacacacatagccttcatggagctgagcagcctgagatctgaggacacggccatgtatttctgtgcaacagagctatcaacagctacgcacgccaattttgactactggggccagggaaccctggtcaccgtctcctcag

SEQ ID NO: 11178 - DNA, 364 bp, Homo sapiens
gaggtgcagctggtggagtctgggggagacttggtccagcctggggggtccctgagactctcctgtgcagcctctggatttacttttagtaggagttggatgagctgggtccgccaggctccaggcaaggggctggagtgggtggccgacataaatgaagatggaagtgagaaatactatgtggagtctgtgaagggccgattcaccatctccagagacaacgccaagaactcactgtatctgcaactgaagagcctgagagccgaggacacggctgtgtattactgtgtgagaagttatgtggttcggggagctctacatgatcactactggggccggggagccctggtcaccgtctcctcag

SEQ ID NO: 11179 - DNA, 361 bp, Homo sapiens
caggtgcagctacagcagtggggcgcaggactgttgaagccttcggagaccctgtccctcacctgcggtgtctatggtgggtccttcagtgactactactggacctggatccgccagcccccagggaaggggctggagtggattggtgaaatcaatcatagtggacgcaccaactacaatccgtccctcaggagtcgagtcaccatgtcagtagacacggccaagaagcagttctccctgaatcttaactctgtgaccgccgcggacacggctgtgtattactgtgcgagagggtggcggtggctcttacgcgagccatttgactactggggccagggaaccctggtcaccgtctcctcag

SEQ ID NO: 11180 - DNA, 361 bp, Homo sapiens
caggtgcagctacagcagtggggcgcaggactgttgaagccttcggagaccctgtccctcacctgcgctgtctatggtgggtccttcagtggttactactggagctggatccgccagcccccagggaaggggctggagtggattggggaaatcaatcatagtggaagcaccaactacaacccgtccctcaagagtcgagtcaccatatcagtagacacgtccaagaaccagttctccctgaagctgagctctgtgaccgccgcggacacggctgtgtattactgtgcgagagaccggggtagtggctaccagcgaccttttgactactggggccagggaaccctggtcaccgtctcctcag

SEQ ID NO: 11181 - DNA, 363 bp, Homo sapiens
caggtgcagctggtgcagtctggggctgaggtgaagaagcctgggtcctcggtgaaggtctcctgcaaggcttctggaggcaccttcagcagctatgctatcagctgggtgcgacaggcccctggacaagggcttgagtggatgggagggatcatccctatctttggtacagcaaactacgcacagaagttccagggcagagtcacgattaccgcggacgaatccacgagcacagcctacatggagctgagcagcctgagatctgaggacacggccgtgtattactgtgcgagaggattgagtggttattatttgtcctggttcgacccctggggccagggaaccctggtcaccgtctcctca

SEQ ID NO: 11182 - DNA, 364 bp, Homo sapiens
caggtgcagctggtgcagtctggggctgaggtgaagaagcctgggtcctcggtgaaggtctcctgcaaggcttctggaggcaccttcagtaactatgctatcagctgggtgcgacaggcccctggacaagggcttgagtggatgggagggatcatccctatctttaatacagcaaatcacgcacagaagttccagggcagagtcacgattaccgcggacgaatccacgagcacagcctacatggagctgagcagcctgagatctgaggacacggccgtgtattactgtgcgaccctcacgcacgcggcagcaactgaccccttcgacccctggggccagggaaccctggtcaccgtctcctcag

SEQ ID NO: 11183 - DNA, 361 bp, Homo sapiens
caggtgcagctgcaggagtcgggcccaggactggtgaagccttcggagaccctgtccctcacctgcactgtctctggtggctccatcagtagttactactggagctggatccggcagcccccagggaagggactggagtggattgggtatatctattacagtgggagcaccaactacaacccctccctcaagagtcgagtcaccatatcagtagacacgtccaagaaccagttctccctgaagctgagctctgtgaccgctgcggacacggccgtgtattactgtgcgagagagatccggctgctggtattaggctggttcgacccctggggccagggaaccctggtcaccgtctcctcag

SEQ ID NO: 11184 - DNA, 361 bp, Homo sapiens
caggtgcagctgcaggagtcgggcccaggactggtgaagccttcggagaccctgtccctcacctgcactgtctctggtggctccatcagtagttactactggagctggatccggcagcccccagggaagggactggagtggattgggtatatctattacagtgggagcaccaactacaacccctccctcaagagtcgagtcaccatatcagtagacacgtccaagaaccagttctccctgaagctgagctctgtgaccgctgcggacacggccgtgtattactgtgcgagagatctggggttcggggagtttaactggttcgacccctggggccagggaaccctggtcaccgtctcctcag

SEQ ID NO: 11185 - DNA, 379 bp, Homo sapiens
caggtgcagctgcaggagtcgggcccaggactggtgaagccttcggagaccctgtccctcacctgcactgtctctggtggctccatcagcagtagtagttactactggggctggatccgccagcccccagggaaggggctggagtggattgggagtatctattatagtgggagcacctactacaacccgtccctcaagagtcgagtcaccatatcagtagacacgtccaagaaccagttctccctgaagctgagctctgtgaccgccgcagacacggctgtgtattactgtgcgagacgtattcctggtggcaattactatgatagtagtggtccctttgactactggggccagggaaccctggtcaccgtctcctcag

SEQ ID NO: 11186 - DNA, 364 bp, Homo sapiens
caggtgcagttggtggagtctgggggaggcgtggtccaggctgggaggtccctgagactctcctgtgcagcctctggattcaccttcagaagttatggcatccactgggtccgccaggctccaggcaaggggccggagtgggtggcagttatatcatatgatggaagtaataaatattatgcagactccgtgaagggccgattcaccatctccagagacaattccaagaacacgctgtatctgcaaatgaacaccctgagagctgaggacacggctgtgtattactgtgcgagagcccgtagtggttattacttcgatgcttttgatatctggggccaagggacaatggtcaccgtctcttcag

SEQ ID NO: 11187 - DNA, 364 bp, Homo sapiens
caggtgcagctggtggagtctgggggaggcgtggtccagcctgggaggtccctgagactctcctgtgcagcctctggattcaccttcagtatctatggcattcactgggtgcgccaggctccaggcaaggggctggagtgggtggcagttatatcatatgatggaagtaataaatactttgcagactccgtgaagggccgattcaccatctccagagacaattccaagaatacgctgtatctgcaaatgaacagcctgagagctgaggacacggctgtctattactgtgcgaaaccccatagtgggagctactttgatgcttttgatatctggggccaagggacaatggtcaccgtctcctcag

SEQ ID NO: 11188 - DNA, 364 bp, Homo sapiens
caggtgcagctggtggagtctgggggaggcgtggtccagcctgggaggtccctgagactctcctgtgcagcctctggattcaccttcagtacctatgccatacactgggtccgccaggctccagtcaaggggctggagtgggtggcagttatttcatatgatggatataataaatactatgcggactccgtgaggggccgattcaccatatccagagacaattccaagaacacgctgtatctgcaaatgaacagcctgagagctgaggacacggctgtgtattactgtgcgaaatcggcttcggggaattatctagatgcttttgatatctggggccaagggacaatggtcaccgtctcttcag

SEQ ID NO: 11189 - DNA, 366 bp, Homo sapiens
gaggtgcagctgttggagtctgggggaggcttggtacagcctggggggtccctgagactctcctgtgcagcctctggattcacctttagcagctatgccatgagctgggtccgccaggctccagggaaggggctggagtgggtctcagctattagtggtagtggtggtagcacatactacgcagactccgtgaagggccggttcaccatctccagagacaattccaagaacacgctgtatctgcaaatgaacagcctgagagccgaggacacggccgtatattactgtgcgtcccagctgctaaacccctactactactacggtatggacgtctggggccaagggaccacggtcaccgtctcctca

SEQ ID NO: 11190 - DNA, 369 bp, Homo sapiens
caggtgcagctgcaggagtcgggcccaggactggtgaagccttcacagaccctgtccctcacctgcactgtctctggtggctccatcagcagtggtagttactactggagctggatccggcagcccgccgggaagggactggagtggattgggcgtatctataccagtgggagcaccaactacaacccctccctcaagagtcgagtcaccatatcagtagacacgtccaagaaccagttctccctgaagctgagctctgtgaccgccgcagacacggccgtgtattactgtgcgagagggtataactggaattactactactacggtatggacgtctggggccaagggaccacggtcaccgtctcctca

SEQ ID NO: 11191 - DNA, 364 bp, Homo sapiens
caggtgcagctggtggagtctgggggaggcgtggtccagcctgggaggtccctgagactctcctgtgcagcgtctggatttaccttcagtaactatggcatgcactgggtccgccaggctccaggcaaggggctggagtgggtggcagttatatggtatgatggaagtaataaatactatgcagactccgtgaagggccgattcaccatctccagagacaattccaagaacacgctgtatttggaagtgagcagcctgagaactgaggacacggctgtgtattactgtgcaagaactaacaatgggaactacaacggctactttgactactggggccagggaaccctggtcaccgtctcctcag

SEQ ID NO: 11192 - DNA, 370 bp, Homo sapiens
caggtcaccttgaaggagtctggtcctgcgctggtgaaatccacagagaccctcacactgacctgcaccttctctgggttctcactcagcactagtggaatgcgtgtgagctggatccgtcagcccccagggaaggccctggagtggcttgcacgcattgattgggatgatgataaattctacagcacatctctgaagaccaggctcaccatctccaaggacacctccaaaaaccaggtggtcctaacaatgaccaacatggaccctgtggacacagccacgtattactgtgcacggatggcttactatgattcggggatttcttataggtactactggggccagggaaccctggtcaccgtctcctcag

SEQ ID NO: 11193 - DNA, 367 bp, Homo sapiens
gaggtgcagctgttggagtctgggggaggcttggtacagcctggggggtccctgagactctcctgtgcagcctctggattcacctttagcagctatgccatgagctgggtccgccaggctccagggaaggggctggagtgggtctcagctattagtggtagtggtggtagcacatactacgcagactccgtgaagggccggttcaccatctccagagacaattccaagaacacgctgtatctgcaaatgaacagcctgagagccgaggacacggccgtatattactgtgcgaaaattatacgatttttggagtggttatcctactttgactactggggccagggaaccctggtcaccgtctcctcag

SEQ ID NO: 11194 - DNA, 364 bp, Homo sapiens
caggtccagctggtacagtctggggctgaggtgaagaagcctggggcctcagtgaaggtctcctgcaaggtttccggatacaccctccctgaattatccatacactgggtgcgacaggctcctggaaaagggcttgagtggatgggaggttttgatcctgaagatgttcaaacaatctacgcacagaagttccagggcagagtcaccatgaccgaggacacatctacagacacagcctacatggagctgagcagcctgagatctgaggacacggccgtgtattactgtgcagcaggtcctgcagtggtaactccctcgtggttcgacccctggggccagggaaccctggtcaccgtctcctcag

SEQ ID NO: 11195 - DNA, 367 bp, Homo sapiens
caggtgcagctggtgcagtctggggctgaggtgaagaagcctggggcctcagtgaaggtctcctgcaaggcttctggatacaccttcaccggctactatatgcactgggtgcgacaggcccctggacaagggcttgagtggatgggatggatcaaccctaacagtggtgtcacaaactatgcacagaagtttcagggctgggtcaccatgaccagggacacgtccatcagcacagcctacatggagctgagcaggctgagatctgacgacacggccgtgtattactgtgcgagagaaacgacaatggatacagctatggcggcgattgactactggggccagggaaccctggtcaccgtctcctcag

SEQ ID NO: 11196 - DNA, 367 bp, Homo sapiens
gaggtgcagctggtggagtctgggggaggcctggtcaagcctggggggtccctgagactctcctgtgcagcctctggattcaccttcagtagctatagcatgaactgggtccgccaggctccagggaaggggctggagtgggtctcatccattagtagtagtagtagttacatatactacgcagactcagtgaagggccgattcaccatctccagagacaacgccaagaactcactgtatctgcaaatgaacagcctgagagccgaggacacggctgtgtattactgtgcgagatcgatctcgagtgggagctactccgcccctttggtctactggggccagggaaccctggtcaccgtctcctcag

SEQ ID NO: 11197 - DNA, 364 bp, Homo sapiens
caggtccagctggtacagtctggggctgaggtgaagaagcctggggcctcagtgaaggtctcctgcaaggtttccggatacaccctcactgaattatccatgcactgggtgcgacaggctcctggaaaagggcttgagtggatgggaggttttgatcctgaagatgctgaaacaatctacgcacagaagttccagggcagagtcaccatgaccgaggacacatctacagacacagcctacatggagctgagcagcctgagatctgaggacacggccgtgtattactgtgcaacacgttttgcgattttaggcaacgcccccccggattactggggccagggaaccctggtcaccgtctcctcag

SEQ ID NO: 11198 - DNA, 370 bp, Homo sapiens
cagatcaccttgaaggagtctggtcctacgctggtgaaacccacacagaccctcacgctgacctgcaccttctctggattctcattcaacactagtagagtgggtgtgggctggatccgtcagcccccaggaaaggccctggagtggcttgcactcatttattgggatgatgataagcgctacagcccatctctgaagagcaggctcaccatcaccaaggactcctccgaaaaccaggtggtccttaccatggcccacatggaccctgtggacacaggcacatattactgtacacgcctgcctgccagtacctggttcggggactggttcgacccctggggccagggaaccctggtcaccgtctcctcag

SEQ ID NO: 11199 - DNA, 367 bp, Homo sapiens
caggtccaactggtacagtctggggctgcggtgaagaagcctggggcctcagtgaaggtctcctgcaaggtttccggatacaccctcgctgaattatccatgcactgggtgcgacaggctcctggaaaagggcttgagtggatgggaggttttaatcttgaagctggtgaaacattctacgcacagaagttccagggcagagtcaccatgaccgaggacacatctacagacacagcctacatggagctgagcagcctgagatttgaggacacggccgtgtattactgtgcaacaaggtttgcgtactttgatagtagtggttactgggactactggggccagggaaccctggtcaccgtctcctcag

SEQ ID NO: 11200 - DNA, 364 bp, Homo sapiens
caggtgcagctgcaggagtcgggcccaggactggtgaagccttcggagaccctgtccctcacctgcactgtctctggtggctccatcagtagttactactggagctggatccggcagcccccagggaagggactggagtggattgggtatatctattacagtgggagcaccaactacaacccctccctcaagagtcgagtcaccatatcagtagacacgtccaagaaccagttctccctgaagctgagctctgtgaccgctgcggacacggccgtgtattactgtgcgagagaggcggacagtaactacgtttatggctggttcgacccctggggccagggaaccctggtcaccgtctcctcag

SEQ ID NO: 11201 - DNA, 391 bp, Homo sapiens
gaggtgcagctggtggagtccgggggaggcttggtccagcctggggggtccctgaaactctcctgtgcagcctctgggttcaccttcagtggctctgctatgcactgggtccgccaggcttccgggaaagggctggagtgggttggccgtattagaagcaaagctaacagttacgcgacagcatatgctgcgtcggtgaaaggcaggttcaccatctccagagatgattcaaagaacacggcgtatctgcaaatgaacagcctgaaaaccgaggacacggccgtgtattactgtactagacaaccacctgactattactatgatagtagtggttattacgtagatgcttttgatatctggggccaagggacaatggtcaccgtctcttcag

SEQ ID NO: 11202 - DNA, 364 bp, Homo sapiens
caggtgcagctggtgcagtctggggctgaggtgaagaagcctgggtcctcggtgaaggtctcctgcgagacttctggaggcaccttcggcagctttgttatcagctgggtgcgacaggcccctggacaagggcttgagtggatgggagggatcatccctatctttggtacttcaaactacgcacagaagttccagggcagagtcacgattaccgcggacgaatccacgagcacagcctacatggagctgagcagcctgagatctgaggacacggccgtgtattactgtgcgagagggtcgatgggttactattatgaatacttccaccactggggccagggcaccctggtcaccgtctcctcag

SEQ ID NO: 11203 - DNA, 387 bp, Homo sapiens
caggtgcagctgcaggagtcgggcccaggactggtgaagccttcacagaccctgtccctcacctgcactgtctctggtggctccatcagcagtggtggttactactggagctggatccgccagcacccagggaagggcctggagtggattgggtacatctattacagtgggagcacctactacaacccgtccctcaagagtcgagttaccatatcagtagacacgtctaagaaccagttctccctgaagctgagctctgtgactgccgcggacacggccgtgtattactgtgcgagagatggggtagtagtaccagctgctacctggtcggggaaagactacggtatggacgtctggggccaagggaccacggtcaccgtctcctca

SEQ ID NO: 11204 - DNA, 384 bp, Homo sapiens
caggtgcagctggtgcagtctggggctgaggtgaagaagcctgggtcctcggtgaaggtctcctgcaaggcttctggaggcaccttcagcagctatgctatcagctgggtgcgacaggcccctggacaagggcttgagtggatgggagggatcatccctatctttggtacagcaaactacgcacagaagttccagggcagagtcacgattaccgcggacgaatccacgagcacagcctacatggagctgagcagcctgagatctgaggacacggccgtgtattactgtgcgagagatgggcgtattgtagtagtaccagctgctccgtactactactacggtatggacgtctggggccaagggaccacggtcaccgtctcctca

SEQ ID NO: 11205 - DNA, 367 bp, Homo sapiens
caggtgcaggtggtgcagtctggggcagaggtgaagaagcctgggtcctcggtgaaggtctcctgcaaggcttctggaggcaccttcagcagctatgctatcagctgggtgcgacaggcccctggacaagggcttgagtggatgggagggatcatccctatctttggtacagcaaactacgcacagaagttccagggcagagtcacgattaccgcggacaaatccacgagcacagcctacatggagctgagcagcctgagatctgaggacacggccgtgtatttctgtgcgagacacgggatatatgatagtactggttatggctatgactactggggccagggaaccctggtcaccgtctcctcag

SEQ ID NO: 11206 - DNA, 367 bp, Homo sapiens
caggtgcagctggtgcagtctggggctgaggtgaagaagcctgggtcctcggtgaaggtctcctgcaaggcttctggaggcaccttcagcagttatgctatcagctgggtgcgacaggcccctggacaagggcttgagtggatgggagggatcatccctatctttggtacagcaaactacgcacagaagttccagggcagagtcacgattaccgcggacgaatccacgagcacagcctacatggagctgagcagcctgagatctgaggacacggccgtgtattactgtgcgagagaattgccctatgatagtagtggttattaccaagactactggggccagggaaccctggtcaccgtctcctcag

SEQ ID NO: 11207 - DNA, 367 bp, Homo sapiens
caggtgcagctggtgcagtctggggctgaggtgaagaagcctgggtcctcggtgaaggtctcctgcaaggcttctggaggcaccttcagcagctatgctatcagctgggtgcgacaggcccctggacaagggcttgagtggatgggagggatcatccctatctttgggacagcaaactacgcacagaagttccagggcagagtcacgattaccgcggacgaatccacgagcacagcctacatggagctgagcagcctgagatctgaggacacggccgtctattactgtgcgagatcatataaatatgatagtagtggtcatttttttgagtactggggccagggaaccctggtcaccgtctcctcag

SEQ ID NO: 11208 - DNA, 384 bp, Homo sapiens
caggttcagctggtgcagtctggagctgaggtgaagaagcctggggcctcagtgaaggtctcctgcaaggcctctggttacagccttaccggctatggaatcatctggctgcgacaggcccctggacaagggcttgagtggatgggatggatcagcgcttacaatggtaacacagactatgcacagaagctccagggcagagtcaccatgaccgcagacacatccacgagcacagtctatatggagctgaggagcctgagatctgacgacacggccgtatattactgtgcgaggaccctgaataattactatgatagaagtggtcattactactactacggtatggacgtctggggccaagggaccacggtcaccgtctcctca

SEQ ID NO: 11209 - DNA, 364 bp, Homo sapiens
caggtgcagctggtgcagtctggggctgaggtgaagaagcctggggcctcagtgaaggtctcctgcaaggcttctggatacactttcaccagttatgatatcaactgggtgcgacaggccgctggacaagggcttgagtggatgggatggatgaaccctaatagtggttacacagagtatgcacagaagttccagggcagagtcaccatgaccaggaacacctccataagcgcagcctacatggagctgagcagcctgatatctgaggacacggccgtgtattactgtgcgagaggggagtattacgctgaatccgaatacttccagcactggggccagggcaccctggtcaccgtctcctcag

SEQ ID NO: 11210 - DNA, 384 bp, Homo sapiens
gaggtgcagctggtggagtctgggggaggcttggtacagcctggggggtccctgagactctcctgtgcagcctctggattcaccttcagtagctatagcatgaactgggtccgccaggctccagggaaggggctggagtgggtttcatacattagtagtagtagtagtaccatatactacgcagactctgtgaagggccgattcaccatctccagagacaatgccaagaactcactgtatctgcaaatgaacagcctgagagccgaggacacggctgtgtattactgtgcgagagatctcattgtagtagtaccagctgccggatactactactactacggtatggacgtctggggccaagggaccacggtcaccgtctcctca

SEQ ID NO: 11211 - DNA, 384 bp, Homo sapiens
gaggtgcagctgttggagtctgggggaggcttggtacagcctggggggtccctgagactctcctgtgcagcctctggattcacctttagcagctatgccatgagctgggtccgccaggctccagggaaggggctggagtgggtctcagctattagtggtagtggtggtagcacatactacgcagactccgtgaagggccggttcaccatctccagagacaattccaagaacacgctgtatctgcaaatgaacagcctgagagccgaggacacggccgtatattactgtgcgaaatccccatatgattacgtttgggggagttatcgactcgactactacggtatggacgtctggggccaagggaccacggtcaccgtctcctca

SEQ ID NO: 11212 - DNA, 366 bp, Homo sapiens
gaggcgcagctggtggagtctggaggagccttgatccagcctggggggtccctgagactctcctgtgcagcctctgggttcaccttcagtagcaacaacatgaactgggtccgccaggctccagggaaggggctggagtgggtctcagtaatttatagcggtggtcgcacatactacgcagactccgtgaagggccgattcaccgtctccagagacaattccaagaacacgctgtatcttcaaatgaacagcctgagagccgacgacacggccgtgtattactgtgcgagagacggcggagccctgccgtactactactacggtctggacgtctggggccaagggaccacggtcaccgtctcctca

SEQ ID NO: 11213 - DNA, 369 bp, Homo sapiens
gaggtgcagttgttggaatctgggggaggcttggtacagcctggggggtccctgagactctcctgctcagcctctggattcatatttagcgcttatgccatgacctgggtccgccaggctccagggaaggggctggagtgggtctcaggtttaagtggcagtggtggtaacacatactacgcagactccgtgaggggccggttcaccatctccagagacaatttcaagaacacgctgtatctgcagatggacagcctgagagtcgaggacacggccgtattttactgtgcgaaagattccgcacaaagcactggctggccctacggtatggacgtctggggccaagggaccacagtcaccgtctcctca

SEQ ID NO: 11214 - DNA, 370 bp, Homo sapiens
cagctgcagctgcaggagtcgggcccaggactggtgaagccttcggagaccctgtccctcacctgcactgtctctggtggctccatcagcagtagtagttactactggggctggatccgccagcccccagggaaggggctggagtggattgggagtatctattatagtgggagcacctactacaacccgtccctcaagagtcgagtcaccatatccgtagacacgtccaagaaccagttctccctgaagctgagctctgtgaccgccgcagacacggctgtgtattactgtgcgagatccatcttccctaccctacttgcctcctggttcgacccctggggccagggaaccctggtcaccgtctcctcag

SEQ ID NO: 11215 - DNA, 369 bp, Homo sapiens
caggtgcagctggtgcagtctggggctgaggtgaagaagcctggggcctcagtgaaggtctcctgcaaggcttctggatacaccttcaccggctactatatgcactgggtgcgacaggcccctggacaagggcttgagtggatgggatggatcaaccctaacagtggtggcacaaactatgcacagaagtttcagggctgggtcaccatgaccagggacacgtccatcagcacagcctacatggagctgagcaggctgagatctgacgacacggccgtgtattactgtgcgagagagcgtggatacagctatggttactactacggtatggacgtctggggccaagggaccacggtcaccgtctcctca

SEQ ID NO: 11216 - DNA, 369 bp, Homo sapiens
gaggtgcagctggtggagtccgggggaggcttagttcagcctggggggtccctgagactctcctgtgcagcctctggattcaccttcagtagctactggatgcactgggtccgccaagctccagggaaggggctggtgtgggtctcacgtattaatagtgatgggagtagcacaagctacgcggactccgtgaagggccgattcaccatctccagagacaacgccaagaacacgctgtatctgcaaatgaacagtctgagagccgaggacacggctgtgtattactgtgcaaggccgactacagtaatttcctcctactactacggtatggacgtctggggccaagggaccacggtcaccgtctcctca

SEQ ID NO: 11217 - DNA, 369 bp, Homo sapiens
gaggtgcagctggtggagtctgggggaggcttggtccagcctggggggtccctgagactctcctgtgcagcctctggattcacctttagtagctattggatgagctgggtccgccaggctccagggaaggggctggagtgggtggccaacataaagcaagatggaagtgagaaatactatgtggactctgtgaagggccgattcaccatctccagagacaacgccaagaactcactgtatctgcaaatgaacagcctgagagccgaggacacggctgtgtattactgtgcgagataccttcactggggatccttttcctactacggtatggacgtctggggccaagggaccacggtcaccgtctcctca

SEQ ID NO: 11218 - DNA, 366 bp, Homo sapiens
caggtgcaactgcaggagtcgggcccgggactggtgaagccttcggagaccctgtccctcacctgcactgtctctggtggctccatcagtagtttctactggagctggatccggcagcccgccgggaagggactggagtggattgggcgtatctatagcggtggagacaccaacttcaacccctccctcaagagtcgagtcgccatgtcagtagacacgtccaagagccagatctccctgaagctgagctctgtgacggccgcggacacggccatgtattactgtgcgaggaatccctttcttactactgtgactgtctacggaatggacgtctggggccaagggaccacggtcaccgtctcgtca

SEQ ID NO: 11219 - DNA, 366 bp, Homo sapiens
caggtgcagctacagcagtggggcgcaggactgttgaagccttcggagaccctgtccctcacctgcgctgtctatggtgggtccttcagtggttactactggagctggatccgccagcccccagggaaggggctggagtggattggggaaatcaatcatagtggaagcaccaactacaacccgtccctcaagagtcgagtcaccatatcagtagacacgtccaagaaccagttctccctgaagctgagctctgtgaccgccgcggacacggctgtgtattactgtgcgagaggctccttactatggttcggggacggctacggtatggacgtctggggccaagggaccacggtcaccgtctcctca

SEQ ID NO: 11220 - DNA, 366 bp, Homo sapiens
caggtgcagctacagcagtggggcgcaggactgttgaagccttcggagaccctgtccctcacctgcgctgtctatggtgggtccttcagtggttactactggagctggatccgccagcccccagggaaggggctggagtggattggggaaatcaatcatagtggaagcaccaactacaacccgtccctcaagagtcgagtcaccatatcagtagacacgtccaagaaccagttctccctgaagctgagctctgtgaccgccgcggacacggctgtgtattactgtgcgagacgaatgggagctacttcctactactactacggtatggacgtctggggccaagggaccacggtcaccgtctcctca

SEQ ID NO: 11221 - DNA, 370 bp, Homo sapiens
cagatcaccttgaaggagtctggtcctacgctggtgaaacccacacagaccctcacgctgacctgcaccttctctgggttctcactcaccactgatggagtgggtgtgggctggatccgtcagccccccggaaaggccctggaatggcttgcactcatttattgggatgatgataagcggttcagcccatctctgagcagcaggctcaccatctccaaggacacctccaaaaaccaggtggtccttacaatgaccaacatggaccctgcggacacagccacatattactgtgcacactcggtagtgacttttggagtggttatcatgtttgactcctggggccagggaaccctggtcaccgtctcctcag

SEQ ID NO: 11222 - DNA, 369 bp, Homo sapiens
gaggtgcagctggtggagtctgggggaggcctggtcaagcctggggggtccctgagactctcctgtgcagcctctggattcaccttcagtagctatagcatgaactgggtccgccaggctccagggaaggggctggagtgggtctcatccattagtagtagtagtagttacatatactacgcagactcagtgaagggccgattcaccatctccagagacaacgccaagaactcactgtatctgcaaatgaacagcctgagagccgaggacacggctgtgtattactgtgcgagagatttgaggataatgggctactactactacggtatggacgtctggggccaagggaccacggtcaccgtctcctca

SEQ ID NO: 11223 - DNA, 370 bp, Homo sapiens
caggtgcagctggtgcggtctggggctgaggttaagaagcctgggtcctcggtgaaggtctcctgcaaggcttctggaggcaccttcagcagccatgctatcacctgggtgcgacaggcccctggacaagggcttgagtggatgggagggatcatccctttctttggtacagcaaactacgcacagaagttccaggacagagtcacgattaccgcggacgaatccacgagcacagcctccatggagctgagcagcctgagatctgaggacacggccgtgtattactgtgcgagtattgggcactatgatagtggtggttattctcgtgatgactactggggccagggaaccctagtcaccgtctcctcag

SEQ ID NO: 11224 - DNA, 370 bp, Homo sapiens
caggtgcagctggtgcagtctggggctgaggtgaagaagcctgggtcctcggtgaaggtctcctgcaaggcttctggaggcaccttcagcagctatgctatcagctgggtgcgacaggcccctggacaagggcttgagtggatgggagggatcatccctatctttggtacagcaaactacgcacagaagttccagggcagagtcacgattaccgcggacgaatccacgagcacagcctacatggagctgagcagcctgagatctgaggacacggccgtgtattactgtgcgagaacccacggcggtcgatttttggagtggttcccccttgggtactggggccagggaaccctggtcaccgtctcctcag

SEQ ID NO: 11225 - DNA, 370 bp, Homo sapiens
caggtgcagctggtgcagtctggggctgaggtgaagaagcctggggcctcagtgaaggtttcctgcaaggcatctggatacaccttcaccagctactatatgcactgggtgcgacaggcccctggacaagggcttgagtggatgggaataatcaaccctagtggtggtagcacaagctacgcacagaagttccagggcagagtcaccatgaccagggacacgtccacgagcacagtctacatggagctgagcagcctgagatctgaggacacggccgtgtattactgtgcgagaagccccatgtattactatgatagtagtggttatttcgactactggggccagggaaccctggtcaccgtctcctcag

SEQ ID NO: 11226 - DNA, 367 bp, Homo sapiens
caggtgcagctacagcagtggggcgcaggactgttgaagccttcggagaccctgtccctcacctgcgctgtctatggtgggtccttcagtggttactactggagctggatccgccagcccccagggaaggggctggagtggattggggaaatcaatcatagtggaagcaccaactacaacccgtccctcaagagtcgagtcaccatatcagtagacacgtccaagaaccagttctccctgaagctgagctctgtgaccgccgcggacacggctgtatattactgtgcgagaggatgggggtatagcagcagctggtacggtctctttgactactggggccagggaaccctggtcaccgtctcctcag

SEQ ID NO: 11227 - DNA, 370 bp, Homo sapiens
gaggtgcagctggtggagtctgggggaggtgtggtacggcctggggggtccctgagactctcctgtgcagcctctggattcacctttgatgattatggcatgagctgggtccgccaagctccagggaaggggctggagtgggtctctggtattaattggaatggtggtagcacaggttatgcagactctgtgaagggccgattcaccatctccagagacaacgccaagaactccctgtatctgcaaatgaacagtctgagagccgaggacacggccttgtatcactgtgcgagagcagttagtgggacgcattgggggcttgactactttgactactggggccagggaaccctggtcaccgtctcctcag

SEQ ID NO: 11228 - DNA, 370 bp, Homo sapiens
gaggtgcagctgttggagtctgggggaggcttggtacagcctggggggtccctgagactctcctgtgcagcctctggattcacctttagcagctatgccatgagctgggtccgccaggctccagggaaggggctggagtgggtctcagctattagtggtagtggtggtagcacatactacgcagactccgtgaagggccggttcaccatctccagagacaattccaagaacacgctgtatctgcaaatgaacagcctgagagccgaggacacggccgtatattactgtgcgaagagcgtgggctattgtagtagtaccagctgctactttgactactggggccagggaaccctggtcaccgtctcctcag

SEQ ID NO: 11229 - DNA, 373 bp, Homo sapiens
cagctgcagctgcaggagtcgggcccaggactggtgaagccttcggagaccctgtccctcacctgcactgtctctggtggctccatcagcagtagtagttactactggggctggatccgccagcccccagggaaggggctggagtggattgggagtatctattatagtgggagcacctactacaacccgtccctcaagagtcgagtcaccatatccgtagacacgtccaagaaccagttctccctgaagctgagctctgtgaccgccgcagacacggctgtgtattactgtgcgagacatctgggcaattactatgatagtagtggttattacgactactggggccagggaaccctggtcaccgtctcctcag

SEQ ID NO: 11230 - DNA, 376 bp, Homo sapiens
gaggtgcagctggtggagtccgggggaggcttggtccagcctggggggtccctgaaactctcctgtgcagcctctgggttcaccttcagtggctctgctatgcactgggtccgccaggcttccgggaaagggctggagtgggttggccgtattagaagcaaagctaacagttacgcgacagcatatgctgcgtcggtgaaaggcaggttcaccatctccagagatgattcaaagaacacggcgtatctgcaaatgaacagcctgaaaaccgaggacacggccgtgtattactgtactagactggggtcggatattgtagtagtaccagaagaaaatgactactggggccagggaaccctggtcaccgtctcctcag

SEQ ID NO: 11231 - DNA, 370 bp, Homo sapiens
caggtgcagctggtgcagtctggggctgaggtgaagaagcctggggcctcagtgaaggtctcctgcaaggcttctggatacaccttcaccggctactatatgcactgggtgcgacaggcccctggacaagggcttgagtggatgggatggatcaaccctaacagtggtggcacaaactatgcacagaagtttcagggcagggtcaccatgaccagggacacgtccatcagcacagcctacatggagctgagcaggctgagatctgacgacacggccgtgtattactgtgcgagaagccaggctactacgtggggggtggagtactactttgactactggggccagggaaccctggtcaccgtctcctcag

SEQ ID NO: 11232 - DNA, 385 bp, Homo sapiens
caggtgcagctggtgcagtctggggctgaggtgaagaagcctggggcctcagtgaaggtctcctgcaaggcttctggatacaccttcaccggctactatatggactgggtgcgacaggcccctggacaagggcttgagtggatgggatggatcaaccctaacagtggtggcgcaaactatgcacagaagtttcagggcagggtcaccatgaccagggacacgtccatcagcacagcctacatggagctgagcaggctgagatctgacgacacggccgtgtattactgtgcgagagaggtttccttcttcaagaaaaattactatgatagtagtggttattgccttgactactggggccagggaaccctggtcaccgtctcctcag

SEQ ID NO: 11233 - DNA, 385 bp, Homo sapiens
caggtgcagctggtgcagtctggggctgaggtgaagaagcctggggcctcagtgaaggtctcctgcaaggcttctggatacaccttcaccgactactatatgcactgggtgcgacaggcccctggacaagggcttgagtggatgggatggatcaaccctaacagtggtggcacaaactatgcacagaagtttcagggctgggtcaccatgaccagggacacgtccatcagcacagtctacatggagctgagcaggctgagatctgacgacacggccgtgtattactgtgcgagagacttcggatattgtagtggtggtagctgctactcattaattttcagtcttgactactggggccagggaaccctggtcaccgtctcctcag

SEQ ID NO: 11234 - DNA, 370 bp, Homo sapiens
caaatgcagctggcgcagtctgggcctgaggtgaagaagcctgggacctcagtgaaggtctcctgcaaggcttctggattcacctttagtagctctgctgtacagtgggtgcgacaggctcgtggacaacgccttgagtggataggatggatcgtcgttggcagtggtaagacaaacaacgcacagaggttccaggaaagagtcaccattaccagggacatgtccacaagcacagcctacatggagctgagcagcctgagatccgaggacacggccgtgtattactgtgcggccccacattgtaatggtggtcgctgctatgatggttttgatatctggggccaagggacaatggtcaccgtctcttcag

SEQ ID NO: 11235 - DNA, 370 bp, Homo sapiens
caggtgcagctgcaggagtcgggcccaggactggtgaagccttcggggaccctgtccctcacctgcgctgtctctggtggctccatcagcagtagtaactggtggagttgggtccgccagcccccagggaaggggctggagtggattggggaaatctatcatagtgggagcaccaactacaacccgtccctcaagagtcgagtcaccatatcagtagacaagtccaagaaccagttctccctgaagctgagctctgtgaccgctgcggacacggccgtgtattactgtgcgagagaacccgggtatagcagcagctggtggtactactttgactactggggccagggaaccctggtcaccgtctcctcag

SEQ ID NO: 11236 - DNA, 372 bp, Homo sapiens
gaggtgcagctggtggagtctgggggaggcttggtacagcctggggggtccctgagactctcctgtgcagcctctggattcaccttcagtagctatagcatgaactgggtccgccaggctccagggaaggggctggagtgggtttcatacattagtagtagtagtagtaccatatactacgcagactctgtgaagggccgattcaccatctccagagacaatgccaagaactcactgtatctgcaaatgaacagcctgagagacgaggacacggctgtgtattactgtgcgagaactatacagctatggggacaggcctactactacggtatggacgtctggggccaagggaccacggtcaccgtctcctca

SEQ ID NO: 11237 - DNA, 372 bp, Homo sapiens
caggtccagcttgtgcagtctggggctgaggtgaagaagcctggggcctcagtgaaggtttcctgcaaggcttctggatacaccttcactagctatgctatgcattgggtgcgccaggcccccggacaaaggcttgagtggatgggatggatcaacgctggcaatggtaacacaaaatattcacagaagttccagggcagagtcaccattaccagggacacatccgcgagcacagcctacatggagctgagcagcctgagatctgaagacacggctgtgtattactgtgcgagagatttggcagtggctgtgagtttctactactacggtatggacgtctggggccaagggaccacggtcaccgtctcctca

SEQ ID NO: 11238 - DNA, 376 bp, Homo sapiens
gaggtgcagctggtggagtctgggggaggcttggtacagccagggcggtccctgagactctcctgtacagcttctggattcacctttggtgattatgctatgagctggttccgccaggctccagggaaggggctggagtgggtaggtttcattagaagcaaagcttatggtgggacaacagaatacgccgcgtctgtgaaaggcagattcaccatctcaagagatgattccaaaagcatcgcctatctgcaaatgaacagcctgaaaaccgaggacacagccgtgtattactgtactagagactcggagttggggtggggatttatagcagcagctgcctactggggccagggaaccctggtcaccgtctcctcag

SEQ ID NO: 11239 - DNA, 378 bp, Homo sapiens
gaggtgcagctggtggagtctgggggaggcttggtaaagcctggggggtcccttagactctcctgtgcagcctctggattcactttcagtaacgcctggatgagctgggtccgccaggctccagggaaggggctggagtgggttggccgtattaaaagcaaaactgatggtgggacaacagactacgctgcacccgtgaaaggcagattcaccatctcaagagatgattcaaaaaacacgctgtatctgcaaatgaacagcctgaaaaccgaggacacagccgtgtattactgtaccacagcctacgatttttggagtggttatccgttctccggtatggacgtctggggccaagggaccacggtcaccgtctcctca

SEQ ID NO: 11240 - DNA, 375 bp, Homo sapiens
cagctgcagctgcaggagtcgggcccaggactggtgaagccttcggagaccctgtccctcacctgcactgtctctggtggctccatcagcagtagtagttactactggggctggatccgccagcccccagggaaggggctggagtggattgggagtatctattatagtgggagcacctactacaacccgtccctcaagagtcgagtcaccatatccgtagacacgtccaagaaccagttctccctgaagctgagctctgtgaccgccgcagacacggctgtgtattactgtgcgagggggcgtaggtttatggtgtactactactactacggtatggacgtctggggccaagggaccacggtcaccgtctcctca

SEQ ID NO: 11241 - DNA, 373 bp, Homo sapiens
caggtgcagctggtgcagtctggggctgaattgaagaagcctgggtcctcggtgaaggtctcctgcaaggcttctggaggcaccttcagcagctatgctatcagctgggtgcgacaggcccctggacaagggcttgagtggatgggagggatcatccctatctttggtacagcaacctacgcacagaagttccagggcagagtcacgattaccgcggacaaatccacgagcacagcctacatggagctgagcagcctgagatctgaggacacggccgtgtattactgtgcgagtggggggggttacgatattttgagtggttattcggcgttcgacccctggggccagggaaccctggtcaccgtctcctcag

SEQ ID NO: 11242 - DNA, 372 bp, Homo sapiens
caggtgcagctggtgcagtctggggctgaggtgaagaagcctggggcctcagtgaaggtctcctgcaaggcttctggatacaccttcaccagttatgatatcaactgggtgcgacaggccactggacaagggcttgagtggatgggatggatgaaccctaacagtggtaacacaggctatgcacagaagttccagggcagagtcaccatgaccaggaacacctccataagcacagcctacatggagctgagcagcctgagatctgaggacacggccgtgtattactgtgcgagagggggatacagctatggtttatactactactacggtatggacgtctggggccaagggaccacggtcaccgtctcctca

SEQ ID NO: 11243 - DNA, 370 bp, Homo sapiens
caggtgcagctggtgcagtctggggctgaggtgaagaagcctggggcctcagtgaaggtctcctgcaaggcttctggatacaccttcaccggctactatatgcactgggtgcgacaggcccctggacaagggcttgagtggatgggatggatcaaccctaacagtggtggcacaaactatgcacagaagtttcagggcagggtcaccatgaccagggacacgtccatcagcacagcctacatggagctgagcaggctgagatctgacgacacggccgtgtattactgtgcgagagtgttgggcggatacagctatggtcttgatgcttttgatatctggggccaggggacaatggtcaccgtctcttcag

SEQ ID NO: 11244 - DNA, 373 bp, Homo sapiens
gaggtgcagctggtggagtctgggggaggcctggtcaagcctggggggtccctaagactctcctgcgcagcctctggattcaccttcaatagttataccatgaactgggtccgccaggctccagggaaggggctggagtgggtctcatccattagtagtgcttctacttacatatactatgcagactcagtgaagggccgattcaccgtctccagagacaacgtcaagagctcactgtttctgcaaatgaatggcctgagagccgaggacacggctgtatatttttgtgcgagggagatcccttatcgtttggattggttattatccgagtatgactactggggccagggaaccctggtcaccgtctcctcag

SEQ ID NO: 11245 - DNA, 373 bp, Homo sapiens
gaggtgcagctggtggagtctgggggaggcctggtcaagcctggggggtccctgagactctcctgtgcagcctctggattcaccttcagtagctatagcatgaactgggtccgccaggctccagggaaggggctggagtgggtctcatccattagtagtagtagtagttacatatactacgcagactcagtgaagggccgattcaccatctccagagacaacgccaagaactcactgtatctgcaaatgaacagcctgagagccgaggacacggctgtgtattactgtgcgagagatcgttcaactggaacttggttacggttttactactttgactactggggccagggaaccctggtcaccgtctcctcag

SEQ ID NO: 11246 - DNA, 373 bp, Homo sapiens
caggtgcagctgcaggagtcgggcccaggactggtgaagccttcggggaccctgtccctcacctgcgctgtctctggtggctccatcagcagtagtaactggtggagttgggtccgccagcccccagggaaggggctggagtggattggggaaatctatcatagtgggagcaccaactacaacccgtccctcaagagtcgagtcaccatatcagtagacaagtccaagaaccagttctccctgaagctgagctctgtgaccgccgcggacacggccgtgtattactgtgcgagaggtggggtgtatagcagtggctggtacgtctggtactttgactactggggccagggaaccctggtcaccgtctcctcag

SEQ ID NO: 11247 - DNA, 373 bp, Homo sapiens
caggtgcagctggtgcagtctggggctgaggtgaagaagcctgggtcctcggtgaaggtctcctgcaaggcttctggaggcaccttcagcagctatgctatcagctgggtgcgacaggcccctggacaagggcttgagtggatgggagggatcatccctatctttggtacagcaaactacgcacagaagttccagggcagagtcacgattaccgcggacgaatccacgagcacagcctacatggagctgagcagcctgagatctgaggacacggccgtgtattactgtgcgagatgggtctatgatagtagtggttattactactccacatttgactactggggccagggaaccctggtcaccgtctcctcag

SEQ ID NO: 11248 - DNA, 358 bp, Homo sapiens
ggtgcagctgcgggagtcgggccccggactggtgaagccttcggagaccctgtccctcacctgcactgtctctggtgactccatcattagttattactggagctgggtccggcagcccgccgggaagggactggagtggattgggcgtatatactccagtgggagcaccaactgcaacccctccctcaagagtcgagtcaccatgtcagtagacacgtccaagaaccagttctccctgaagctgacctctgtgaccgccgcggacacggccgtgtattactgtacgagagatctaggacccggatttttgggggtgggtgagggtatggacgtctggggccaagggaccacggtcacc

SEQ ID NO: 11249 - DNA, 378 bp, Homo sapiens
caggtgcagctggtggagtctgggggaggcgtggtccagcctgggaggtccctgagactctcctgtgcagcgtctggattcaccttcagtagctatggcatgcactgggtccgccaggctccaggcaaggggctggagtgggtggcagttatatggtatgatggaagtaataaatactatgcagactccgtgaagggccgattcaccatctccagagacaattccaagaacacgctgtatctgcaaatgaacagcctgagagccgaggacacggctgtgtattactgtgcgagagagaactattactatggttcggggagttattacctagcgggtatggacgtctggggccaagggaccacggtcaccgtctcctca

SEQ ID NO: 11250 - DNA, 378 bp, Homo sapiens
gaggtgcagctggtggagtctgggggaggcttggtccagcctggggggtccctgagactctcctgtgcagcctctggattcacctttagtagctattggatgagctgggtccgccaggctccagggaaggggctggagtgggtggccaacataaagcaagatggaagtgagaaatactatgtggactctgtgaagggccgattcaccatctccagagacaacgccaagaactcactgtatctgcaaatgaacagcctgagagccgaggacacggctgtgtattactgtgcgagagatccgcgcagcagctggtatcgctactactactactacggtatggacgtctggggccaagggaccacggtcaccgtctcctca

SEQ ID NO: 11251 - DNA, 378 bp, Homo sapiens
caggtgcagctgcaggagtcgggcccaggactggtgaagccttcggggaccctgtccctcacctgcgctgtctctggtggctccatcagcagtagtaactggtggagttgggtccgccagcccccagggaaggggctggagtggattggggaaatctatcatagtgggagcaccaactacaacccgtccctcaagagtcgagtcaccatatcagtagacaagtccaagaaccagttctccctgaagctgagctctgtgaccgccgcggacacggccgtgtattactgtgcgagagattgtggaggcagagcagcagctggtatccactactacggtatggacgtctggggccaagggaccacggtcaccgtctcctca

SEQ ID NO: 11252 - DNA, 370 bp, Homo sapiens
caggtgcagctgcaggagtcgggcccaggactggtgaagccttcggagaccctgtccctcacctgcactgtctctggtggctccatcagtagttactactggagctggatccggcagcccgccgggaagggactggagtggattgggcgtatctataccagtgggagcaccaactacaacccctccctcaagagtcgagtcaccatgtcagtagacacgtccaagaaccagttctccctgaagctgagctctgtgaccgccgcggacacggccgtgtattactgtgcgagagtaagggggtccgtgctagcagcagctgccaactggttcgacccctggggccagggaaccctggtcaccgtctcctcag

SEQ ID NO: 11253 - DNA, 373 bp, Homo sapiens
caggtgcagctgcaggagtcgggcccaggactggtgaagccttcggggaccctgtccctcacctgcgctgtctctggtggctccatcagcagtagtaactggtggagttgggtccgccagcccccagggaaggggctggagtggattggggaaatctatcatagtgggagcaccaactacaacccgtccctcaagagtcgagtcaccatatcagtagacaagtccaagaaccagttctccctgaagctgagctctgtgaccgccgcggacacggccgtgtattactgtgcgagagaccaatactatgatagtagtggttatcgggggtggttcgacccctggggccagggaaccctggtcaccgtctcctcag

SEQ ID NO: 11254 - DNA, 373 bp, Homo sapiens
caggtgcagctgcaggagtcgggcccaggactggtgaagccttcggggaccctgtccctcacctgcgctgtctctggtggctccatcagcagtagtaactggtggagttgggtccgccagcccccagggaaggggctggagtggattggggaaatctatcatagtgggagcaccaactacaacccgtccctcaagagtcgagtcaccatatcagtagacaagtccaagaaccagttctccctgaagctgagctctgtgaccgccgcggacacggccgtgtattactgtgcgagagatagcgcgtttgggggagttatcgctcggggatggttcgacccctggggccagggaaccctggtcaccgtctcctcag

SEQ ID NO: 11255 - DNA, 375 bp, Homo sapiens
caggtgcacctgcaggagtcgggcccaggactggtgaagccttcggagaccctgtccctcacctgcactgtctctggtggctccatcagtagttactactggagctggatccggcagcccccagggaagggactggagtggattgggtatatctattacagtgggagcaccaactacaacccctccctcaagagtcgagtcaccatatcagtagacacgtccaagaaccagttctccctgaagctgagctctgtgaccgccgcggacacggctgtgtattactgtgcgagaggccggctacgtggcagctcagccttctcccccctatacggtatggacgtctggggccaagggaccacggtcaccgtctcctca

SEQ ID NO: 11256 - DNA, 376 bp, Homo sapiens
cagctgcagctgcaggagtcgggcccaggactggtgaaggcttcggagaccctgtccctcagctgcactgtctctggtggctccatcagtactagtaattactactggggctggatccgccagcccccagggaagggcctggagtggattgggactatccattatagtgggaaaacctactacaacccgtccctcaagagtcgagtcaccatatccgtagacacgtccaagaacctgttctccctgaagctgagctctgtgaccgccgcagacacggctctatattactgtgcgagagatttctcacctggagatgatagtagtggttatgggttgggctactggggccagggaaccctggtcaccgtctcctcag

SEQ ID NO: 11257 - DNA, 370 bp, Homo sapiens
caggtgcagctgcaggagtcgggcccaggactggtgaagccttcggagaccctgtccctcacctgcactgtctctggtggctccatcagtagttactactggagctggatccggcagcccccagggaagggactggagtggattgggtatatctattacagtgggagcaccaactacaacccctccctcaagagtcgagtcaccatatcagtagacacgtccaagaaccagttctccctgaagctgagctctgtgaccgctgcggacacggccgtgtattactgtgcgagagtcgagtcaaccccccgtggatacagctatggttcccttgactactggggccagggaaccctggtcaccgtctcctcag

SEQ ID NO: 11258 - DNA, 375 bp, Homo sapiens
caggtgcagctacagcagtggggcgcaggactgttgaagccttcggagaccctgtccctcacctgcgctgtctatggtgggtccttcagtggttactactggagctggatccgccagcccccagggaaggggctggagtggattggggaaatcaatcatagtggaagcaccaactacaacccgtccctcaagagtcgagtcaccatatcagtagacacgtccaagaaccagttctccctgaagctgagctctgtgaccgccgcggacacggctgtgtattactgtgcgagaggccctagcagtggctggtcgacgccctactactactacggtatggacgtctggggccaagggaccacggtcaccgtctcctca

SEQ ID NO: 11259 - DNA, 378 bp, Homo sapiens
caggtgcagctggtgcagtctggggctgaggtgaagaagcctgggtcctcggtgaaggtctcctgcaaggcttctggaggcaccttcagcagctatgctatcagctgggtgcgacaggcccctggacaagggcttgagtggatgggagggatcatccctatctttggtacagcaaactacgcacagaagttccagggcagagtcacgattaccgcggacgaatccacgagcacagcctacatggagctgagcagcctgagatctgaggacacggccgtgtattactgtgcgagagaccaaggatatagtggctacgatttgcggacgggggacggtatggacgtctggggccaagggaccacggtcaccgtctcctca

SEQ ID NO: 11260 - DNA, 378 bp, Homo sapiens
caggtgcagctggtgcagtctggggctgaggtgaagaagcctgggtcctcggtgaaggtctcctgcaaggcttctggaggcaccttcagcagctatgctatcagctgggtgcgacaggcccctggacaagggcttgagtggatgggagggatcatccctatctttggtacagcaaactacgcacagaagttccagggcagagtcacgattaccgcggacgaatccacgagcacagcctacatggagctgagcagcctgagatctgaggacacggccgtgtattactgtgcgagaggaatagtgcgggcaaatggttgggtggactactactacggtatggacgtctggggccaagggaccacggtcaccgtctcctca

SEQ ID NO: 11261 - DNA, 378 bp, Homo sapiens
caggtgcagctggtgcagtctggggctgaggtgaagaagcctggggcctcagtgaaggtctcctgcaaggcttctggatacaccttcaccggctactttatgcactgggtgcgacaggcccctggacaagggcttgagtggatgggatggatcaaccctaacagtggtggcacaaactatccacagaggtttcagggcagggtcaccatgaccagggacacgtccctcagcacagcctacatggaactgagtaggctgagatctgacgacacggccgtgtattactgtgcgggctattgcagtagtaccagttgcccacccatcgactactacggtatggacgtttggggccaagggaccacggtcaccgtctcctca

SEQ ID NO: 11262 - DNA, 370 bp, Homo sapiens
gaggtgcagctggtggagtctggaggagacttgatccagcctggggggtccctgagactctcctgtgcagcctctgggttctccgtcagtagcaactacatgagctgggtccgccagactccagggaaggggctggagtgggtctcaattatttatagcggtggtactacatattacgcagactccgtgaagggccgattcaccatctcaagagacaattccaagaacaccctctatcttcaaatgaacagcctgagacccgacgacacggccgtatattactgtgcgaatgtagccggaataacagctcatcctgcctatgatgcttttgatatctggggccaagggacaatggtcaccgtctcttcag

SEQ ID NO: 11263 - DNA, 378 bp, Homo sapiens
gaggtgcagctggtggagtctgggggaggcctggtcaagcctggggggtccctgagactctcctgtgcagcctctggattcaccttcagtagctatagcatgaactgggtccgccaggctccagggaaggggctggagtgggtctcatccattagtagtagtagtagttacatatactacgcagactcagtgaagggccgattcaccatctccagagacagcgccaagaactcactgtttctgcaaatgaacagcctgagagccgaggacacggctgtgtattactgtgcgagaggacttacgatttttggagtggtgaactactactactacggtatggacgtctggggccaagggaccacggtcaccgtctcctca

SEQ ID NO: 11264 - DNA, 378 bp, Homo sapiens
gaggtgcagctggtggagtctgggggaggcctggtcaagcctggggggtccctgagactctcctgtgcagcctctggattcaccttcagtagctatagcatgaactgggtccgccaggctccagggaaggggctggagtgggtctcatccattagtagtagtagtagttacatatactacgcagactcagtgaagggccgattcaccatctccagagacaacgccaagaactcactgtatctgcaaatgaacagcctgagagccgaggacacggctgtgtattactgtgcgagagatccgcgcagcagctggtatcgctactactactactacggtatggacgtctggggccaagggaccacggtcaccgtctcctca

SEQ ID NO: 11265 - DNA, 376 bp, Homo sapiens
caggtgcagctgcaggagtcgggcccaggactggtgaagccttcggagaccctgtccctcacctgcactgtctctggtggctccatcagtagttactactggagctggatccggcagcccccagggaagggactggagtggattgggtatatctattacagtgggagcaccaactacaacccctccctcaagagtcgagtcaccatatcagtagatacgtccaagaaccagttctccctgaagctgagctctgtgaccgctgcggacacggccgtgtattactgtgcgagagagggttactatgatagtagtggttattatcaccatgatgcttttgatatctggggccaagggacaatggtcaccgtctcttcag

SEQ ID NO: 11266 - DNA, 376 bp, Homo sapiens
caggtgcagctacagcagtggggcgcaggactgttgaagccttcggagaccctgtccctcacctgcgctgtctatggtgggtccttcagtggttactactggagctggatccgccagcccccagggaaggggctggagtggattggggaaatcaatcatagtggaagcaccaactacaacccgtccctcaagagtcgagtcaccatatcagtagacacgtccaagaaccagttctccctgaagctgagctctgtgaccgccgcggacacggctgtgtattactgtgcgagaggccgggatattttgactggttattaccgacaaactgatgcttttgatatctggggccaagggacaatggtcaccgtctcttcag

SEQ ID NO: 11267 - DNA, 379 bp, Homo sapiens
caggtgcagctggtgcagtctggggctgaggtgaagaagcctgggtcctcggtgaaggtctcctgcaaggcttctggaggcaccttcagcagctatgctatcagctgggtgcgacaggcccctggacaagggcttgagtggatgggagggatcatccctatctttggtacagcaaactacgcacagaagttccagggcagagtcacgattaccgcggacgaatccacgagcacagcctacatggagctgagcagcctgagatctgaggacacggccgtgtattactgtgcgagagtgggtggatattgtagtggtggtagctgctactcttactactttgactactggggccagggaaccctggtcaccgtctcctcag

SEQ ID NO: 11268 - DNA, 355 bp, Homo sapiens
caggtgcagctggtggagtctgggggaggcgtggtccagcctgggaggtccctgagactctcctgtgcagcctctggattcaccttcagtagctatggcatgcactgggtccgccaggctccaggcaaggggctggagtgggtggcagttatatcatatgatggaagtaataaatactatgcagactccgtgaagggccgattcaccatctccagagacaattccaagaacacgctgtatctgcaaatgaacagcctgagagctgaggacacggctgtgtattactgtgcgaaagcagatggctacagacctgacggctactggggccagggaaccctggtcaccgtctcctcag

SEQ ID NO: 11269 - DNA, 379 bp, Homo sapiens
caggtgcagctggttgaatctgggggaggcttggtcaagcctggagggtccctgagactctcctgtgcagcctctggattcactttcagtgactactacatgagctggatccgccaggctccagggaaggggctggagtggatttcatacattagtcgtcgtggtaataccatattctacgcagactctgtgaagggccgattcaccatctccggggacaacgccaagaactcactgtatctgcaaatggacagcctgagagccgaggacacggccgtgtattactgtgcgagagatcctacctcattacgatattttgactggccccagtactactttgactactggggccagggaaccctggtctccgtctcctcag

SEQ ID NO: 11270 - DNA, 378 bp, Homo sapiens
caggttcacctggtgcagtctggagctgaggtgaagaagcctggggcctcagtgaaggtctcctgcaaggcttctgattacacctttaccaactttggtatcaactgggtgcgacaggcccctggacaagggcttgagtggatgggatggatcagcgctgacaatggtaacacaaattatgcacacaagctccagggcagagtcaccctgaccacagacacatccacgagtacagcctacatggacctgaggagcctgagatctgacgacacggccgtgtattactgtgcgagagatacggtggaactattttatgagtcctactactactacggtatggacgtctggggccaagggaccacggtcaccgtctcgtca

SEQ ID NO: 11271 - DNA, 352 bp, Homo sapiens
caggtgcagctgcaggagtcgggcccgggactggtgaggccttcggagaccctgtccctcacctgcacagtgtctggtggctccatgagtagtaattactggagctggatccggcagcccccagggaaggcactggagtggattggatatatctattacagagggagcaccaattacaacccctccctcaagagtcgagtcaccatatcagtggacacgtccaagaaccagttttccctgagggttaggtctgtgaccactgcggacacggccgtatattactgtgcgcgagagctacaatacaactgggtcgacccctggggccaggggaccctggtcaccgtctcctcag

SEQ ID NO: 11272 - DNA, 352 bp, Homo sapiens
caggtgcagctgcaggagtcgggcccaggactggtgaagccttcggagaccctgtccctcacctgcactgtctctggtggctccatcagtagttactactggagctggatccggcagcccccagggaagggactggagtggattgggtatatctattacagtgggagcaccaactacaacccctccctcaagagtcgagtcaccatatcagtagacacgtccaagaaccagttctccctgaagctgagctctgtgaccgctgcggacacggccgtgtattactgtgcgctgagcccggggggtggttaccttgactactggggccagggaaccctggtcaccgtctcctcag

SEQ ID NO: 11273 - DNA, 378 bp, Homo sapiens
caggtgcagctggtggagtctgggggaggcgtggtccagcctgggaggtccctgagactctcctgtgcagcctctggattcaccttcagtagctatggcatgcactgggtccgccaggctccaggcaaggggctggagtgggtggcagttatatcatatgatggaagtaataaatactatgcagactccgtgaagggccgattcaccatctccagagacaattccaagaacacgctgtatctgcaaatgaacagcctgagagctgaggacacggctgtgtattactgtgcgaaacctctaagggaattactatggttcggggggtactactacggtatggacgtctggggccaagggaccacggtcaccgtctcctca

SEQ ID NO: 11274 - DNA, 358 bp, Homo sapiens
gaggtgcagctggtggactctgggggaggcttggtccagcctggggggtccctgagactctcctgtgcagcctctggattcacctttagtgtctattggatgagttgggtccgccaggctccagggaaggggctggagtgggtggccaacataaagcaagatggaagtgagaaatactatgtggactctgtgaatggccgattcaccatctccagagacaacgccaagaactcactgtatctgcaaatgagcagcctgagagccgaggacacggctgtgtattactgtgcgagagtagagatggccacaatttcgcttgacttctggggccagggaaccctggtcaccgtctcctcag

SEQ ID NO: 11275 - DNA, 354 bp, Homo sapiens
caggtgcagctacagcagtggggcgcaggactgttgaagccttcggagaccctgtccctcacctgcgctgtctatggtgggtccttcagtggttactactggagctggatccgccagcccccagggaaggggctggagtggattggggaaatcaatcatagtggaagcaccaactacaacccgtccctcaagagtcgagtcaccatatcagtagacacgtccaagaaccagttctccctgaagctgagctctgtgaccgccgcggacacggctgtgtattactgtgcgagaggccggcgggctagatacggtatggacgtctggggccaagggaccacggtcaccgtctcctca

SEQ ID NO: 11276 - DNA, 358 bp, Homo sapiens
cagctgcagctgcaggagtcgggcccaggactggtgaagccttcggagaccctgtccctcacctgcactgtctctggtggctccatcagcagtggtagttactactggggctgggtccgccaggccccagggatgggactggagtggattgggagtatctcttatagtgggagcacctactacaccccgtccctcaagagtcgagtcaccatatccttagacacgtccaagaaccagttctccctgaggctgacctctgtgaccgccgcagacacggctgtttattactgtgcgaaaattggagcagtggccgacttccagcactggggccagggcaccctggtcaccgtctcctcag

SEQ ID NO: 11277 - DNA, 363 bp, Homo sapiens
gaggtgcagctggtggagtctgggggaggcttggtaaagcctggggggtcccttagactctcctgtgcagcctctggattcactttcagtaacgcctggatgagctgggtccgccaggctccagggaaggggctggagtgggttggccgtattaaaagcaaaactgatggtgggacaacagactacgctgcacccgtgaaaggcagattcaccatctcaagagatgattcaaaaaacacgctgtatctgcaaatgaacagcctgaaaaccgaggacacagccgtgtattactgtaccatggatagcagtggctggtacggtatggacgtctggggccaagggaccacggtcaccgtctcctca

SEQ ID NO: 11278 - DNA, 361 bp, Homo sapiens
cagatcaccttgaaggaatctggtcctacgctggtgaaacccacacagaccctcacgctgacctgcaccttctctgggttctcactcagcactagtggagtgggtgtgggctggatccgtcagcccccaggaaaggccctggagtggcttgcactcatttattgggatgatgataagcgctacagcccatctctgaagagcagactcaccatcaccaaggacacctccaaaaaccaggtggtcctcacaatgaccaacttggaccctgtggacacagccacatattactgtgcacacagtttttggttagcagcggcttacagttactggggccagggaaccctggtcaccgtctcctcag

SEQ ID NO: 11279 - DNA, 361 bp, Homo sapiens
caggtcaccttgaaggagtctggtcctgcgctggtgaaacccacacagaccctcacactgacctgcaccttctctgggttctcactcagcactagtggaatgcgtgtgagctggatccgtcagcccccagggaaggccctggagtggcttgcacgcattgattgggatgatgataaattctacagcacatctctgaagaccaggctcaccatctccaaggacacctccaaaaaccaggtggtccttacaatgaccaacatggaccctgtggacacagccacgtattactgtgcacggagtagtaagtgggagctagcccttgactactggggccagggaaccctggtcaccgtctcctcag

SEQ ID NO: 11280 - DNA, 358 bp, Homo sapiens
cagatcaccttgaaggagtctggtcctacgctggtgaaacccacacagaccctcacgctgacctgcaccttctctgggttctcactcagcactagtggagtgggtgtgggctggatccgtcagcccccaggaaaggccctggagtggcttgcactcatttattgggatgatgataagcgctacagcccatctctgaagagcaggctcaccatcaccaaggacacctccaaaaaccaggtggtccttacaatgaccaacatggaccctgtggacacagccacatattactgtgcacacaagcgtacaagtagtggttattactactggggccagggaaccctggtcaccgtctcctcag

SEQ ID NO: 11281 - DNA, 358 bp, Homo sapiens
gaagtgcaaatagtggagtctgggggaggcttggtacagcctggctggtccctgagactctcgtgtgtagtctctggattcaccttcggtgattataccatgcactgggtccggcaagctccagggaagggcctggagtggatctcaggtattagtcgggaaagtggcagtataggctatgcggactctgtgaggggccgtttcactatctccagagacaacgccaaggactccctttatctacaaatgagtggtctgacaattgaagacacggccttctattactgtgtaaaagattttgctcgctcgtcctactttcactactggggccggggaaccccagtcaccgtctcctcag

SEQ ID NO: 11282 - DNA, 355 bp, Homo sapiens
gaggtgcagctggtggagtctggaggaggcttgatccagcctggggggtccctgagactctcctgtgcagcctctgggttcaccgtcagtagcaactacatgagctgggtccgccaggctccagggaaggggctggagtgggtctcagttatttatagcggtggtagcacatactacgcagactccgtgaagggccgattcaccatctccagagacaattccaagaacacgctgtatcttcaaatgaacagcctgagagccgaggacacggccgtgtattactgtgcgagagtaagcggatatcgtcgtgactttgactactggggccagggaaccctggtcaccgtctcctcag

SEQ ID NO: 11283 - DNA, 358 bp, Homo sapiens
caggtgcagctggtggagtctgggggaggcgtggtccagcctgggaggtccctgagactctcctgtgcagcctctggattcaccttcagtagctatggcatgcactgggtccgccaggctccaggcaaggggctggagtgggtggcagttatatggtatgatggaagtaataaatactatgcagactccgtgaagggccgattcaccatctccagagacaattccaagaacacgctgtatctgcaaatgaacagcctgagagccgaggacacggctgtgtattactgtgcgaggtcattacgatttcggtactactttgactactggggccagggaaccctggtcaccgtctcctcag

SEQ ID NO: 11284 - DNA, 355 bp, Homo sapiens
caggtgcagctgcaggagtcgggcccaggactggtgaagccttcggggaccctgtccctcacctgcgctgtctctggtggctccatcagcagtagtaactggtggagttgggtccgccagcccccagggaaggggctggagtggattggggaaatctatcatagtgggagcaccaactacaacccgtccctcaagagtcgagtcaccatatcagtagacaagtccaagaaccagttctccctgaagctgagctctgtgaccgccgcggacacggccgtgtattactgtgctttggtgcagcagcgcaactggttcgacccctggggccagggaaccctggtcaccgtctcctcag

SEQ ID NO: 11285 - DNA, 352 bp, Homo sapiens
gaggtgcatctggtggagtctgggggaggcttgataccgccgggggggtccctcagactgtcctgtgtagcctctggaatcgttttccctaaggcctggatgaactgggtccgccaggctccagggaaggggccggaatgggttgcccgtattaaggcgaaaagtgatggtgagacaaaagattacgctccttccgtgaaagacagattcttcatctcaagagatgatttgaggaacacaatatatctacagatgaatagcctgaggaccgaggacacagccgtgtattattgtgcaacattatataatgtcgacccctggggccagggaacccaggtcaccgtctcctcag

SEQ ID NO: 11286 - DNA, 346 bp, Homo sapiens
gaggtgcagctgttggagtctgggggaggcttggtacagcctggggggtccctgagactctcctgtgcagcctctggattcacctttaccgactatgccatgagctgggtccgccaggctccaggaaaggggctggagtgggtctcaactattactaggagtggtgatagtacatactacgcagactccgtgaagggccggttcagcatctccagagacaattccaagaaaacgttgtctctacagatgaacagcctgagagtcgaggacacggccgtatattactgctccgacccgattctgtcccgcgactggggccagggaaccctagtcatcgtctcctcag

SEQ ID NO: 11287 - DNA, 349 bp, Homo sapiens
gaggtgcagctggtggagtccggaggaggcttgatgcagccgggggggtccctgagactctcctgtgcagcctcgggattcaccgtcagtagcagttacatgagttggatccgcctggctccagggaaggggctacagtgggtcgcaattatctacagcgggggtaacacaaactatgcagactccgtgaggggccgattcaccatctccagagacatttccaaaaatacaatatttcttcagatgaacagcctgagcaccgaggacacggccgtatattactgtacgaaaaacctccgacaatatgctgaatactggggccagggaaccgtggtcaaagtctcctcag

SEQ ID NO: 11288 - DNA, 352 bp, Homo sapiens
gaggtgcagctggtggagtccgggggaggcttagttcagcctggggggtccctgagactctcctgtgcagcctctggattcgccttcagtagctactggatgcactgggtccgccaagctccagggaaggggctggtgtgggtcgcacatattaaaactgatgggactttaacaacttacacggactccgtgaggggccgattcaccacctccagagacaacgccaagaacacgctctatctgcaaatgaatagtctgagagccgaggacacggctgtgtattactgtgtaaaagattggtgggggggtggcgaccactggggccagggaaccctggtcaccgtctcctcag

SEQ ID NO: 11289 - DNA, 358 bp, Homo sapiens
caggtgcagctggtgcagtctggggctgaggtgaagaagcctggggcctcagtgaaggtctcctgcaaggcttctggatacaccttcaccggctactatatgcactgggtgcgacaggcccctggacaagggcttgagtggatgggatggatcaaccctaacagtggtggcacaaactatgcacagaagtttcagggcagggtcaccatgaccagggacacgtccatcagcacagcctacatggagctgagcaggctgagatctgacgacacggccgtgtattactgtgcgagagagctagcagtgggagctactgaggactactggggccagggaaccctggtcaccgtctcctcag

SEQ ID NO: 11290 - DNA, 352 bp, Homo sapiens
gaggtgcagctgttggagtctgggggggacttggtacagcctggggggtccctgagactctcctgtgcagcctctcgattcacctttagcagctatgccatgagctgggtccgccaggctccagggaaggggctggagtgggtctcaactattagtactagtggtggtaacacatactacgcagactccgtgaagggccggttcaccgtctccagagacaattccaagaacacgctgtatctgcaaatgaacaccctgagagccgaggacacggccttatattactgtgcgacagagggccccggtgcttttgatgtctggggccaagggacaatggtcaccgtctcttcag

SEQ ID NO: 11291 - DNA, 390 bp, Homo sapiens
caggtgcagctggtgcagtctggggctgaggtgaagaagcctggggcctcagtgaaggtctcctgcaaggcttctggatacaccttcaccagttatgatatcaactgggtgcgacaggccactggacaagggcttgagtggatgggatggatgaaccctaacagtggttacacagggtatgcacagaatttccagggcagagtcaccatgaccaggaacacctccataaacacagcctacatggagttgagcagcctgagatctgaggacacggccgtgtattactgtgcgagagctacaggggtatattgtactaatggtgtatgctcttactactactactacggtatggacgtctggggccaagggaccacggtcaccgtctcctca

SEQ ID NO: 11292 - DNA, 352 bp, Homo sapiens
gaggtgcagctggtgcagtctggagcagaggtgaaaaagcccggggagtctctgaagatctcctgtaagggttctggatacagctttaccagctactggatcggctgggtgcgccagatgcccgggaaaggcctggagtggatggggatcatctatcctggtgactctgataccagatacagcccgtccttccaaggccaggtcaccatctcagccgacaagtccatcagcaccgcctacctgcagtggagcagcctgaaggcctcggacaccgccatgtattactgtgcgagactctggccctatgcttttgatatctggggccaagggacaatggtcaccgtctcttcag

SEQ ID NO: 11293 - DNA, 352 bp, Homo sapiens
gaggtgcagctggtgcagtctggagcagaggtgaaaaagcccggggagtctctgaagatctcctgtaagggttctggatacagctttaccagctactggatcggctgggtgcgccagatgcccgggaaaggcctggagtggatggggatcatctatcctggtgactctgataccagatacagcccgtccttccaaggccaggtcaccatctcagccgacaagtccatcagcaccgcctacctgcagtggagcagcctgaaggcctcggacaccgccatgtattactgtgcgagacagacgatccatgcttttgatatctggggccaagggacaatggtcaccgtctcttcag

SEQ ID NO: 11294 - DNA, 362 bp, Homo sapiens
gaggtgcagctggtgcagtctggagcagaggtgaaaaagcccggggagtctctgaagatctcctgtaagggttctggatacagctttaccagctactggatcggctgggtgcgccagatgcccgggaaaggcctggagtggatggggatcatctatcctggtgactctgataccagatacagcccgtccttccaaggccaggtcaccatctcagccgacaagtccatcagcaccgcctacctgcagtggagcagcctgaaggcctcggacaccgccatgtattactgtgcgagactctcggagtagtggttattacccaggcccctcctggggccagggaaccctggtcaccgtctcctcag

SEQ ID NO: 11295 - DNA, 391 bp, Homo sapiens
gaggtgcagctgttggagtctgggggaggcttggtacagcctggggggtccctgagactctcctgtgcagcctctggattcacctttagcagctatgccatgagctgggtccgccaggctccagggaaggggctggagtgggtctcagctattagtggtagtggtggtagcacatactacgcagactccgtgaagggccggttcaccatctccagagacaattccaagaacacgctgtatctgcaaatgaacagcctgagagccgaggacacggccgtatattactgtgcgaaagtccatcccgcaacagaaggatattacgatttttggagtggtcacccgtactactttgactactggggccagggaaccctggtcaccgtctcctcag

SEQ ID NO: 11296 - DNA, 388 bp, Homo sapiens
gaggtgcagctggtggagtctgggggaggcttggtacagcctggggggtccctgagactctcctgtgcagcctctggattcaccttcagtagctatagcatgaactgggtccgccaggctccagggaaggggctggagtgggtttcatacattagtagtagtagtagtaccatatactacgcagactctgtgaagggccgattcaccatctccagagacaatgccaagaactcactgtatctgcaaatgaacagcctgagagacgaggacacggctgtgtattactgtgcgagagatcggtggggcccaggatattgtagtagtaccagctgctacgcggggggctttgactactggggccagggaaccctggtcaccgtctcctcag

SEQ ID NO: 11297 - DNA, 388 bp, Homo sapiens
caggagcagctggtgcagtctggggctgaggtgaagaagcctggggcctcagtgaaggtctcctgcaaggcttctggctacatcttcactggctactatatacactgggtgcgacaggcccctggacaagggcttgagtggatgggatggatcaaccctaacagtggtggcacaaagtatgcacagaagtttcagggcagggtcaccatgaccagggacacgtccatcatcacagcctacatggagctgagcaggctgagattcgacgacacggccgtgtattactgtgcgagagatatgcggtacgatattttgactggttattatttggaccccaagaattggttcgacccctggggccagggaacccaggtcaccgtctcctcag

SEQ ID NO: 11298 - DNA, 387 bp, Homo sapiens
gaggtgcagctggtggagtctgggggaggcctggtcaagcctggggggtccctgagactctcctgtgcagcctctggattcaccttcagtagctatagcatgaactgggtccgccaggctccagggaaggggctggagtgggtctcatccattagtagtagtagtagttacatatactacgcagactcagtgaagggccgattcaccatctccagagacaacgccaagaactcactgtatctgcaaatgaacagcctgagagccgaggacacggctgtgtattactgtgcgagcttactcggcgagggtatagcagctcgtctaaagggctactactactacggtatggacgtctggggccaagggaccacggtcaccgtctcctca

SEQ ID NO: 11299 - DNA, 382 bp, Homo sapiens
caggtccagcttgtgcagtctggggctgaggtgaagaagcctggggcctcagtgaaggtttcctgcaaggcttctggatacaccttcactagctatgctatgcattgggtgcgccaggcccccggacaaaggcttgagtggatgggatggatcaacgctggcaatggtaacacaaaatattcacagaagttccagggcagagtcaccattaccagggacacatccgcgagcacagcctacatggagctgagcagcctgagatctgaagacacggctgtgtattactgtgcgagagcctttacgacgtattactatgatagtagtggttattttgatgcttttgatatctggggccaagggacaatggtcaccgtctcttcag

SEQ ID NO: 11300 - DNA, 390 bp, Homo sapiens
caggtgcagctggtgcagtctggggctgaggtgaagaagcctgggtcctcggtgaaggtctcctgcaaggcttctggaggcaccttcagcagctatgctatcagctgggtgcgacaggcccctggacaagggcttgagtggatgggagggatcatccctatctttggtacagcaaactacgcacagaagttccagggcagagtcacgattaccgcggacgaatccacgagcacagcctacatggagctgagcagcctgagatctgaggacacggccgtgtattactgtgcgagagctacaggggtatattgtactaatggtgtatgctcttactactactactacggtatggacgtctggggccaagggaccacggtcaccgtctcctca

SEQ ID NO: 11301 - DNA, 381 bp, Homo sapiens
gaggtccagctggtacagtctggggctgaggtgaagaagcctggggctacagtgaaaatctcctgcaaggtttctggatacaccttcaccgactactacatgcactgggtgcaacaggcccctggaaaagggcttgagtggatgggacttgttgatcctgaagatggtgaaacaatatacgcagagaagttccagggcagagtcaccataaccgcggacacgtctacagacacagcctacatggagctgagcagcctgagatctgaggacacggccgtgtattactgtgcaacaggcgtaggttactatgatagtagtggttatgggactaactacggtatggacgtctggggccaagggaccacggtcaccgtctcctca

SEQ ID NO: 11302 - DNA, 378 bp, Homo sapiens
caggtgcagctacagcagtggggcgcaggactgttgaagccttcggagaccctgtccctcacctgcgctgtctatggtgggtccttcagtggttactactggagctggatccgccagcccccagggaaggggctggagtggattggggaaatcaatcatagtggaagcaccaactacaacccgtccctcaagagtcgagtcaccatatcagtagacacgtccaagaaccagttctccctgaagctgagctctgtgaccgccgcggacacggctgtgtattactgtgcgagagtttattgtagtggtggtagctgctactcgtactactactacggtatggacgtctggggccaagggaccacggtcaccgtctcctca

SEQ ID NO: 11303 - DNA, 381 bp, Homo sapiens
gaggtgcagctggtggagtctgggggaggcctggtcaagcctggggggtccctgagactctcctgtgcagcctctggattcaccttcagtagctataccatgaactgggtccgccaggctccagggaaggggctggagtgggtctcatccattgacagtagtggtacttacatatactacgcaggctcagtgaagggccgattcaccatctccagagacaacgccaggaactcactggatctccaaatgaacagcctgagagccgaggacacggctgtgtatttctgtgcgagggcctcggagatggctggttactatggtagctactattattacggtttggacgtctggggccaagggaccacggtcaccgtctcctca

SEQ ID NO: 11304 - DNA, 381 bp, Homo sapiens
gaggtgcagctggtggagtctgggggaggcctggtcaagcctggggggtccctgagactctcctgtgcagcctctggattcaccttcagtagctatagcatgaactgggtccgccaggctccagggaaggggctggagtgggtctcatccattagtagtagtagtagttacatatactacgcagactcagtgaagggccgattcaccatctccagagacaacgccaagaactcactgtatctgcaaatgaacagcctgagagccgaggacacggctgtgtattactgtgcgagagattgtagtaccagctgctatgcggattactactactactacggtatggacgtctggggccaagggaccacggtcaccgtctcctca

SEQ ID NO: 11305 - DNA, 381 bp, Homo sapiens
caggtgcagctggtgcagtctggggctgaggtgaagaagcctggggcctcagtgaaggtctcctgcaaggcttctggatacaccttcaccagttatgatatcaactgggtgcgacaggccactggacaagggcttgagtggatgggatggatgaaccctaacagtggtaacacaggctatgcacagaagttccagggcagagtcaccatgaccaggaacacctccataagcacagcctacatggagctgagcagcctgagatctgaggacacggccgtgtattactgtgcgaggggaacgtatagcagcagctggtacccctcccactactactacggtatggacgtctggggccaagggaccacggtcaccgtctcctca

SEQ ID NO: 11306 - DNA, 381 bp, Homo sapiens
caggtgcagctggtgcagtctggggctgaggtgaagaagcctggggcctcagtgaaggtctcctgcaaggcttctggatacaccttcaccagttatgatatcaactgggtgcgacaggccactggacaagggcttgagtggatgggatggatgaaccctaacagtggtaacacaggctatgcacagaagttccagggcagagtcaccatgaccaggaacacctccataagcacagcctacatggagctgagcagcctgagatctgaggacacggccgtgtattactgtgccctaggatattgtagtagtaccagctgctatcgctactactactacggtatggacgtctggggccaagggaccacggtcaccgtctcctca

SEQ ID NO: 11307 - DNA, 391 bp, Homo sapiens
caggtgcagctgcaggagtcgggcccaggactggtgaagccttcacagaccctgtccctcacctgcactgtctctggtggctccatcagcagtggtagttactactggagctggatccggcagcccgccgggaagggactggagtggattgggcgtatctataccagtgggagcaccaactacaacccctccctcaagagtcgagtcaccatatcagtagacacgtccaagaaccagttctccctgaagctgagctctgtgaccgccgcagacacggccgtgtattactgtgcgaggagtcctatgtattactatgatagtagtggttatccagcgtatctttactactttgactactggggccagggaaccctggtcaccgtctcctcag

SEQ ID NO: 11308 - DNA, 382 bp, Homo sapiens
gaggtgcagctgttggagtctgggggaggcttggtacagcctggggggtccctgagactctcctgtgcagcctctggattcacctttagcagctatgccatgagctgggtccgccaggctccagggaaggggctggagtgggtctcagctattagtggtagtggtggtagcacatactacgcagactccgtgaagggccggttcaccatctccagagacaattccaagaacacgctgtatctgcaaatgaacagcctgagagccgaggacacggccgtatattactgtgcgaagggtcgtgattactatgatagtagtggttatcggagtaagaactggttcgacccctggggccagggaaccctggtcaccgtctcctcag

SEQ ID NO: 11309 - DNA, 344 bp, Homo sapiens
gaggtgcaactggttgagtctgggggaggcttggcccagcctgggggttccctgagactctcttgtgcagcctctggatttacctttaaagactactggatgacctgggtccgccaggctccagggaaggggctggagtgggtggccaatataaaggaagatggaactgtcacttactatgcggactctatgaagggccgattcaccatctccagagacaacgccaacaactcactgtatctgcaaatgaagtacctgggagtcgacgacacggctgtatattactgtgcgacaacggggactagtaccaatttctggggccagggaaccctgctcaccgtctc

SEQ ID NO: 11310 - DNA, 349 bp, Homo sapiens
caggtgcagctggtgcagtctggggctgaggtgaagaagcctggggcctcagtgaaggtctcctgcaaggcttctggatacaccttcaccggctactatatgcactgggtgcgacaggcccctggacaagggcttgagtggatgggatggatcaaccctaacagtggtggcacaaactatgcacagaagtttcagggcagggtcaccatgaccagggacacgtccatcagcacagcctacatggagctgagcaggctgagatctgacgacacggccgtgtattactgtgcgagagatcgttttgcgtctgactactggggccagggaaccctggtcaccgtctcctcag

SEQ ID NO: 11311 - DNA, 363 bp, Homo sapiens
caggtgcagctggtggagtctgggggaggcgtggtccagcctgggaggtccctgagactctcctgtgcagcctctggattcaccttcagtagctatggcatgcactgggtccgccaggctccaggcaaggggctggagtgggtggcagttatatcatatgatggaagtaataaatactatgcagactccgtgaagggccgattcaccatctccagagacaattccaagaacacgctgtatctgcaaatgaacagcctgagagctgaggacacggctgtgtattactgtgcgaaatccagggggggggttacaggttcccatttgactactggggccagggaaccctggtcaccgtctcctcag

SEQ ID NO: 11312 - DNA, 417 bp, Homo sapiens
caggtgcagctacaccagtggggcgcaggactgttgaagccttcggagaccctgtccctcacctgcgttgtctatggtgggtccttcagtatttactactggaggtggatccggcagcccccagggaaggggctggagtggattggggacatcaataatagaggaaacaccaactacaaagcgtccctcaagagtcgagtcaccacatcagtagacacgtccaggaagtggttctccctgaagctgaactctgtgaccgccgcggacacggctgtgtatcactgctcgagaggaacacttatttcagatgacgacggttccaaaacagcatccccgaccagccccaaggtcttcccgctgagcctctgcagcacccagccagatgggaacgtggtcatcgcctgcctggtccagggc

SEQ ID NO: 11313 - DNA, 378 bp, Homo sapiens
caggtgcagctgcaggagtcgggcccaggactggtgaagccttcggagaccctgtccctcacctgcactgtctctggtggctccatcagtagttactactggagctggatccggcagcccccagggaagggactggagtggattgggtatatctattacagtgggagcaccaactacaacccctccctcaagagtcgagtcaccatatcagtagacacgtccaagaaccagttctccctgaagctgagctctgtgaccgctgcggacacggccgtgtattactgtgcgagagatcgaggcagagatagcagtggctggtactactactactacggtatggacgtctggggccaagggaccacggtcaccgtctcctca

SEQ ID NO: 11314 - DNA, 206 bp, Homo sapiens
gactccgtgaagggccgattcaccatctccagagacaactccaagaacacgatgtctctgcaaatgatcagcctgagagccgaggacacggctgtgtttcactgtgcgagagattgagccgaagtggctgctattggtcgggcgaaaagcgaacacatactactttgactactggggccagggaaccctggtcaccgtctcctcag

SEQ ID NO: 11315 - DNA, 396 bp, Homo sapiens
caggtgcagctgcacgagtcgggcccaggactggtgaagccttcggagaccctgtccctcacctgcactgtctccggtgactcgttcagcagtgcaagtcacacctggggctggatccgccagcccccagggaaggggctggagtggacaagtcaaattaatcatggtggaggtaccaactccaaaccgtccctcaagagtcgagtcaccatagcagtagactcgtcgaagaaacagtccttcctgaggttgaactctgtgaccgaccgccgcggacacggctgtctactattgtgcgacaagggggaggtagagggtagtgacagccctagttgtcatccaaactgctacgctatggacgtctggggccaagggaccacggtcaccgtctcctca

SEQ ID NO: 11316 - DNA, 244 bp, Homo sapiens; identical to SEQ ID NO: 9688

SEQ ID NO: 11317 - DNA, 156 bp, Homo sapiens
agtagtagtggcagtggctggtaccacagtgacactcgccaggccagaaaccccgtcccaagtcagcggaagcagagagagcagggaggacacgtttaggatctgaggccgcacctgacacccagggcagcagacgtctcccctccagggcaccct

SEQ ID NO: 11318 - DNA, 396 bp, Homo sapiens
gaggtgcagctggtggagtctgggggaggcctggtcaagcctggggggtccctgagactctcctgtgcagcctctggattcaccttcagtagctatagcatgaactgggtccgccaggctccagggaaggggctggagtgggtctcatccattagtagtagtagtagttacatatactacgcagactcagtgaagggccgattcaccatctccagagacaacgccaagaactcactgtatctgcaaatgaacagcctgagagccgaggacacggctgtgtattactgtgcgagagatcaccttcgcggatattgtagtggtggtagctgctactcgggctactactactacggtatggacgtctggggccaagggaccacggtcaccgtctcctca

SEQ ID NO: 11319 - DNA, 408 bp, Homo sapiens
caggtacagctgcagcagtcaggcccaggactggtgaagccctcgcagaccctcttactcacctgtgccatctccggggacagtgtctctagcaacagtgctgcttggaactggatcaggcagtccccatcgagaggccttgagtggctgggaaggacatactacaggtccaagtggaataatgattatgcagtatctgtgaaaagtcgaataaccatcaacccagacacatccaagaaccagttctccctgcagctgaactctgtgactcccgaggacacggctgtgtattactgtgcctcagccacgacggccacggcgtatagcagtggctggtacgggaaagactactactactactacggtatggacgtctggggccaagggaccacggtcaccgtctcctca

SEQ ID NO: 11320 - DNA, 322 bp, Homo sapiens
gacatccagatgacccagtctccatcctccctgtctgcatctgttggagacagagtcaccatcacttgccgggcaagtcagaccattatcagctatttaaattggtatcagcacaaaccagggaaagcccctaacctcctgatctatgctgcatccagtttgcaaagtggggtcccatcaaggttcagtggcagtggatctggaacagatttcactctcaccatcagcagtctgcaacctgaagattttgcaacttactactgtcaacagagttacactaccccgtggacgttcggccaagggaccaaggtggaaatcaaac

SEQ ID NO: 11321 - DNA, 322 bp, Homo sapiens; identical to SEQ ID NO: 11320

SEQ ID NO: 11322 - DNA, 322 bp, Homo sapiens; identical to SEQ ID NO: 11320

SEQ ID NO: 11323 - DNA, 322 bp, Homo sapiens; identical to SEQ ID NO: 11320

SEQ ID NO: 11324 - DNA, 322 bp, Homo sapiens; identical to SEQ ID NO: 11320

SEQ ID NO: 11325 - DNA, 322 bp, Homo sapiens; identical to SEQ ID NO: 11320

SEQ ID NO: 11326 - DNA, 322 bp, Homo sapiens; identical to SEQ ID NO: 11320

SEQ ID NO: 11327 - DNA, 322 bp, Homo sapiens; identical to SEQ ID NO: 11320

SEQ ID NO: 11328 - DNA, 322 bp, Homo sapiens; identical to SEQ ID NO: 11320

SEQ ID NO: 11329 - DNA, 322 bp, Homo sapiens; identical to SEQ ID NO: 11320

SEQ ID NO: 11330 - DNA, 322 bp, Homo sapiens; identical to SEQ ID NO: 11320

SEQ ID NO: 11331 - DNA, 322 bp, Homo sapiens; identical to SEQ ID NO: 11320

SEQ ID NO: 11332 - DNA, 322 bp, Homo sapiens; identical to SEQ ID NO: 11320

SEQ ID NO: 11333 - DNA, 322 bp, Homo sapiens; identical to SEQ ID NO: 11320

SEQ ID NO: 11334 - DNA, 322 bp, Homo sapiens; identical to SEQ ID NO: 11320

SEQ ID NO: 11335 - DNA, 322 bp, Homo sapiens; identical to SEQ ID NO: 11320

SEQ ID NO: 11336 - DNA, 322 bp, Homo sapiens; identical to SEQ ID NO: 11320

SEQ ID NO: 11337 - DNA, 322 bp, Homo sapiens; identical to SEQ ID NO: 11320

SEQ ID NO: 11338 - DNA, 322 bp, Homo sapiens; identical to SEQ ID NO: 11320

SEQ ID NO: 11339 - DNA, 322 bp, Homo sapiens; identical to SEQ ID NO: 11320

SEQ ID NO: 11340 - DNA, 322 bp, Homo sapiens; identical to SEQ ID NO: 11320

SEQ ID NO: 11341 - DNA, 322 bp, Homo sapiens; identical to SEQ ID NO: 11320

SEQ ID NO: 11342 - DNA, 322 bp, Homo sapiens; identical to SEQ ID NO: 11320

SEQ ID NO: 11343 - DNA, 322 bp, Homo sapiens; identical to SEQ ID NO: 11320

SEQ ID NO: 11344 - DNA, 337 bp, Homo sapiens
gatattgtgatgacccagactccactctctctgtccgtcacccctggacagccggcctccatctcctgcaagtctagtcagagcctcctgcatagtgttggaaagaccaatttatattggtacctgcagaagccaggccagcctccacagctcctgatctatgaagtttccaaccggttctctggagtgccagataggttcagtggcagcgggtcagggacagatttcacactgaaaatcagccgggtggaggctgaggatgttggggtttattactgcatgcaaggtacacactggcctccgacgttcggccaagggaccaaggtggaaatcaaac

SEQ ID NO: 11345 - DNA, 337 bp, Homo sapiens
gatattgtgatgacccagactccactctctctgtccgtcacccctggacagccggcctccatctcctgcaagtctagtcagagcctcctgcatagtggtggaaagaccaatttatattggtacctgcagaagccaggccagcctccacagctcctgatctatgaagtttccaaccggttctctggagtgccagataggttcagtggcagcgggtcagggacagatttcacactgaaaatcagccgggtggaggctgaggatgttggggtttattactgcatgcaaagtacacagcttcctttcaccttcggccaagggacacgactggagattaaac

SEQ ID NO: 11346 - DNA, 340 bp, Homo sapiens
gatattgtgatgacccagactccactctctctgtccgtcacccctggacagccggcctccatctcctgcaagtctagtcagagcctcctgcatagtggtggaaagaccaatttatattggtacctgcagaagccaggccagcctccacagctcctgatctatgaagtttccaaccggttctctggagtgccagataggttcagtggcagcgggtcagggacagatttcacactgaaaatcagccgggtggaggctgaggatgttggggtttattactgcatgcaaagtattcagcttcctccattcactttcggccctgggaccaaagtggatatcaaac

SEQ ID NO: 11347 - DNA, 337 bp, Homo sapiens; identical to SEQ ID NO: 11345

SEQ ID NO: 11348 - DNA, 337 bp, Homo sapiens; identical to SEQ ID NO: 11345

SEQ ID NO: 11349 - DNA, 337 bp, Homo sapiens; identical to SEQ ID NO: 11345

SEQ ID NO: 11350 - DNA, 337 bp, Homo sapiens; identical to SEQ ID NO: 11345

SEQ ID NO: 11351 - DNA, 337 bp, Homo sapiens
gatattgtgatgacccagactccactctctctgtccgtcacccctggacagccggcctccatctcctgcaagtctagtcagagcctcctgcatagtactggaaagaccaatttgtattggtacctgcagaagtcaggccagcctccacagctcctgatctatgaagtttccaaccggttctctggggtgccagataggttcagtggcagcgggtcagggacagatttcacactgagaatcagccgggtggaggctgaggatgttgggatttattactgcatgcaaagtacacagcttcctttcaccttcggccaagggacacgactggagattaaac

SEQ ID NO: 11352 - DNA, 322 bp, Homo sapiens
gaaattgtgctgactcagtctccagactttcagtctgtgactccaaaggagaaagtcaccatcacctgccgggccagtcagaggattggtagtagcttacactggtaccagcagaaaccagatcagtctccaaagctcctcatcaagtatgcttcccagcccttctcaggggtcccctcgaggttcagtggcagtggatctgggacagatttcaccctcaccatcaatagcctggaagctgaagatgctgcaacgtattactgtcatcagagtagtagtttaccgtggacgttcggccaagggaccaaggtggaaatcaaac

SEQ ID NO: 11353 - DNA, 322 bp, Homo sapiens; identical to SEQ ID NO: 11352

SEQ ID NO: 11354 - DNA, 322 bp, Homo sapiens; identical to SEQ ID NO: 11352

SEQ ID NO: 11355 - DNA, 322 bp, Homo sapiens
gatattgtgctgactcagtctccagactttcagtctgtgactccaaaggagaaagtcaccatcacctgccgggccagtcagaggattggtagtagcttacactggtaccagcagaaaccagatcagtctccaaagctcctcatcaagtatgcttcccagcccttctcaggggtcccctcgaggttcagtggcagtggatctgggacagatttcaccctcaccatcaatagcctggaagctgaagatgctgcaacgtattactgtcatcagagtagtagtttaccgtggacgttcggccaagggaccaaggtggaaatcaaac

SEQ ID NO: 11356 - DNA, 322 bp, Homo sapiens; identical to SEQ ID NO: 11352

SEQ ID NO: 11357 - DNA, 334 bp, Homo sapiens
cagtctgccctgactcagcctgcctccgtgtctgggtctcctggacagtcgatcaccatctcctgcactggaaccagcagtgacgttggtggttataagtatgtctcctggtaccaacatcacccaggcaaagcccccaaactcatgatttatgaggtcactaatcggccctcaggggtttctaatcgcttctctggctccaagtctggcaacacggcctccctgaccatctctgggctccaggctgaggacgaggctgattattactgcagctcatatacaagcagcagcaccccctgggtgttcggcggagggaccaagctgaccgtcctag

SEQ ID NO: 11358 - DNA, 334 bp, Homo sapiens; identical to SEQ ID NO: 11357

SEQ ID NO: 11359 - DNA, 334 bp, Homo sapiens
cagtctgccctgactcagcctgcctccgtgtctgggtctcctggacagtcgatcaccatctcctgcgctggaaccagtagtgacgttggtggttctaagtatgtctcctggtaccaacatcacccaggcaaagcccccaaactcatgatttatgaggtcactaatcggccctcaggggtttcttatcgcttctctggctccaagtctggcaacacggcctccctgaccatctctgggctccaggctgaggacgaggctgattattactgcagctcgtatacaaccagttacaccccctgggtgttcggcggggggaccaagctgaccgtcctag

SEQ ID NO: 11360 - DNA, 334 bp, Homo sapiens; identical to SEQ ID NO: 11357

SEQ ID NO: 11361 - DNA, 334 bp, Homo sapiens; identical to SEQ ID NO: 11357

SEQ ID NO: 11362 - DNA, 334 bp, Homo sapiens
cagcttgtgctgactcaatcgccctctgcctctgcctccctgggagcctcggtcaagctcacctgcactctgagcaatgggcacagcagctacgccatcgcatggcatcagcagcagccagagaagggccctcggtacttgatgaagcttaacagtgatggcagccacagcaagggggacgggatccctgatcgcttctcaggctccagctctggggctgagcgctacctcaccatctccagcctccagtctgaggatgaggctgactattactgtcagacctggggcactggcattcgggtgttcggcggagggaccaagctgaccgtcctag

SEQ ID NO: 11363 - DNA, 337 bp, Homo sapiens
cagtctgccctgactcagcctgcctccgtgtctgggtctcctggacagtcgatcaccatctcctgcactggaaccagcagtgacgttggtggttataattatgtctcctggtaccaaaagtacccaggcaaagcccccaaactcatgatttatgaggtcagtaatcggccctcaggggtttctaatcgcttctctggctccaagtctggcaacacggcctccctgaccatctctgggctccaggctgaggacgaggctgattattactgcagctcatatacaatcagcagcactctcgatgtggtattcggcggagggaccaagctgaccgtcctag

SEQ ID NO: 11364 - DNA, 334 bp, Homo sapiens; identical to SEQ ID NO: 11362

SEQ ID NO: 11365 - DNA, 334 bp, Homo sapiens; identical to SEQ ID NO: 11362

SEQ ID NO: 11366 - DNA, 328 bp, Homo sapiens
gaaattgtgttgacgcagtctccaggcaccctgtctttgtctccaggggaaagagccaccctctcctgcagggccagtcagactgttatcagcagccacctaaactggtaccagcagaaacctggccaggctcccaggctcgtcatttatggtgtatccagcagggccaccggcatcccagacaggttcagtggcggtgggtctgggacagacttcactctcacaatcaacagactggagcctgaagattttgcagtgtattactgccagcattatgatagaccgtctctgtacacttttggccaggggaccaaggtggaaataaaac

SEQ ID NO: 11367 - DNA, 328 bp, Homo sapiens
gaaattgtgttgacgcagtctccaggcaccttgtctttgtctccaggggaaagagccaccctctcctgcagggccagtcagagtgttagcaacagccgcttagcctggtaccagcagaaacctggccaggctcccaggctcctcatctatggtgcatccagcagggccaccggcatcccagacaagttcagtggcagtgggtccgggacagacttcactctcactatcactagactggagcctgaagattttgcagtgtattactgtcagcagtatggtggttcacctctgtacacttttggccaggggaccaagctggagatcaaac

SEQ ID NO: 11368 - DNA, 325 bp, Homo sapiens
gaagttgtgttgacgcagtctccaggcaccctgtctttgtctccaggggaaaaggccaccctctcctgcaagtccagtcagagtattagcaacaactacttagcctggtaccagcacaaacctggccaggctcccaggctcctcatctatgctgcatccagcagggccactggcgtcccagacaggttcagtggcagtgggtctgggacagactttactctcaccatcaacagactggagcctgaagattttgcagtgtatttctgtcagcagtgtggtggctcaccttcgtacacttttggccaggggaccaaactagagatca

SEQ ID NO: 11369 - DNA, 325 bp, Homo sapiens
gaaattgtgttgacgcagtctccaggcaccctgtctttgtctccaggggaaagagccaccctctcctgcagggccagtcagagtgttagcagcagccgcttagcctggtaccagcagaaacctggccaggctcccaggctcctcatctatggtgcatccagcagggccaccggcatcccagacaggttcagtggcagtgggtctgggacagacttcactctcactatcagcagactggagcctgaagattttgcagtgtattactgtcagcagtttggtggctcacctctgtacacttttggccaggggaccaagctggagatca

SEQ ID NO: 11370 - DNA, 325 bp, Homo sapiens
gaaatagtgatgacgcagtctccagccaccctgtctgtgtcttcaggggaaagagccaccctctcctgcagggccagtcagagtgttagcagcgacttagcctggtatcagcagaaacctggccaggctcccaggctcctcatctatggtgcatccaccagggccactgctatcccagccaggttcagtggcaatgggtctgggacagagttcactctcaccatcagcagcctgcagtctgaagattttgcaatttattactgtcagcagtataataactggcctccgatcaccttcggccaagggacacgactggagattaaac

SEQ ID NO: 11371 - DNA, 325 bp, Homo sapiens; identical to SEQ ID NO: 11370

SEQ ID NO: 11372 - DNA, 325 bp, Homo sapiens; identical to SEQ ID NO: 11370

SEQ ID NO: 11373 - DNA, 330 bp, Homo sapiens
cagtctgccctgattcagcctccctccgtgtccgggtctcctggacagtcagtcaccatctcctgcactggaaccagcggtgttgggagttatgaatatgtctcctggtaccaacagcacccaggcacagtccccaaatccatgatctacaatgtcaattctcagccctcaggggtccctgatcgtttctctggctccaagtctggcaatacggcctccaagaccatctctggactccagtctgaggacgaggctaattattagtgctgctcatatacaagcagtgccacacttatgtcttcggaactgggaccaaggtcaccgtcctag

SEQ ID NO: 11374 - DNA, 331 bp, Homo sapiens
cagtctgtgctgactcagccaccctcagcgtctgggacccccgggcagagggtcaccatctcttgttctggaagcatctccaacatcggaactaattatgtctactggtacctgcagctcccaggaacggcccccagactcctcatttatagtaataatcagcggccctcaggggtccctgaccgattctctggctccaagtctggcacctcagcctccctggccatcagtgggctccggtccgaggatgaggctgattattactgtgcagcatgggatgacaacctgagtggttgggtgttcggcggagggaccaagctgaccgtcctag

SEQ ID NO: 11375 - DNA, 331 bp, Homo sapiens; identical to SEQ ID NO: 11374

SEQ ID NO: 11376 - DNA, 325 bp, Homo sapiens
gaaatagtgatgacgcagtctccagccaccctgtctgtgtctccaggggaaagagccaccctctcctgcagggccagtcagggtgttagcagcaacttagcctggtaccagcagaaacctggccaggctcccaggctcctcatctatggtgcatccaccagggccattggtatcccagccaggtacagtggcagtgggtctgggacagagttcactctcaccatcagcagcctgcagtctgaagattttgcagtttatcactgtcagcagtataatagctggcctccgtacagttttggccaggggaccaaggtggagatcaaac

SEQ ID NO: 11377 - DNA, 325 bp, Homo sapiens; identical to SEQ ID NO: 11376

SEQ ID NO: 11378 - DNA, 325 bp, Homo sapiens; identical to SEQ ID NO: 11376

SEQ ID NO: 11379 - DNA, 320 bp, Homo sapiens
gacatccagatgacccagtctccatcctccctgtctgcatctgtaggagacagagtcaccatcacttgccgggcaagtcagagcattaccgactatttaaattggtatcagcagaaaccagggaaagcccctaagctcctgatctatgctgcatccaatttgcaaagtggggtcccatcaaggttcagtggcagtggatctgggacagatttcactttcaccatcaacagtctgcaacctgaagatgttgcaacttactactgtcaacagagtatcacaacccctcggacgttcggccaagggaccaaggtggaaatcaa

SEQ ID NO: 11380 - DNA, 320 bp, Homo sapiens
gacatccagatgacccagtctccatcctccctgtctgcatctgtaggagacagagtcaccatcacttgccgggcaagtcagagcattaggaactatttaaattggtatcagcagaaaccagggaaagcccctaaactcctgatctatgctgcatccagtttgcaaagtggggtcccatcaaggttcagcggcagtggatctgggacagatttcactttcaccatcacgactctgcaacctgaagattctgcaacttacttctgtcaacagggttacactacccctcggacgttcggccaaggtaccaaggtggaaatcaa

SEQ ID NO: 11381 - DNA, 320 bp, Homo sapiens; identical to SEQ ID NO: 11380

SEQ ID NO: 11382 - DNA, 331 bp, Homo sapiens
cagtctgccctgactcagcctgcctccgtgtctgggtctcctggacagtcgatcaccatctcctgcactggaaccagcagtgatgttgggaattataaccttgtctcctggtaccaacagcacccaggcaaagtccccaaactcatgattcatgaggtcagtaagcggccctcagggatttctaatcgcttctctggctccaagtctggcaacacggcctccctgacaatctctggactccaggctggggacgaggctgattattactgctgctcatatgcaggtagtaccccttatgtcttcggaactgggaccagggtcaccgtcctag

SEQ ID NO: 11383 - DNA, 331 bp, Homo sapiens
cagtctgccctgactcagcctgcctccgtgtctgggtctcctggacagtcgatcaccatctcctgcactggaaccagcagtgatgttgggaattataaccttgtctcctggtaccaacagcacccaggcaaagtccccaaactcatgattcatgaggtcagtaagcggccctcagggatttctaatcgcttctctggctccaagtctggcaacacggcctccctgacaatctctgggctccaggctggggacgaggctgattattactgctgctcatatgcaggtagtaccccttatgtcttcggaactgggaccagggtcaccgtcctag

SEQ ID NO: 11384 - DNA, 334 bp, Homo sapiens
gatattgtgatgactcagtctccactctccctgcccgtcacccctggagagccggcctccatctcctgcaggtctagtcagagcctcctgcatagtagtggatacaactatttggattggtacctgcagaagccagggcagtctccacagctcctgatctatttgggttctaatcgggcctccggggtccctgacaggttcagtggcagtggatcaggcacagattttacactgaaaatcagcagagtggaggctgaggatgttggggtttattactgcatgcaagctctacaaactcggacgttcggccaagggaccaaggtggaaatcaaac

SEQ ID NO: 11385 - DNA, 334 bp, Homo sapiens
gatattgtgatgactcagtctccactctccctgcccgtcacccctggagagccggcctccatctcctgcaggtctagtcagagcctcctgcatagtaatggatacaactatttggattggtatctgcagaagccagggcagtctccacagctcctgatctatttggcttctaatcgggcctccggggtccctgacaggttcagtggcagtggatcaggcacagattttacactgaaaatcagcagagtggaggctgaggatgttggggtttattactgcatggaggctctacaaactcggacgttcggccaagggaccaaggtggaaatcaaac

SEQ ID NO: 11386 - DNA, 328 bp, Homo sapiens; identical to SEQ ID NO: 7644

SEQ ID NO: 11387 - DNA, 322 bp, Homo sapiens; identical to SEQ ID NO: 10725

SEQ ID NO: 11388 - DNA, 322 bp, Homo sapiens
tcctatgagctgacacagccaccctcggtgtcagtgtccccaggacagacggccaggatcacctgctccggagatgcattgccaaagcaatatgcttattggtaccagcagaagccaggccaggcccctgtgttggtgatatataaagacagtgagaggccctcagggatccctgagcgattctctggctccagctcagggacaacagtcacgttgaccatcagtggagtccaggcagaagatgaggctgactattactgtcaatcagcggacagcagtggtacttatgacgtgttcggcggagggaccaggctgaccgtcc

SEQ ID NO: 11389 - DNA, 322 bp, Homo sapiens
tcctatgagctgacacagccaccctcggtgtcagtgtccccaggacagacggccaggatcacctgctccggagatgcattgccaaagcaatatgcttattggtaccagcagaagccaggccaggcccctgtgttggtgatatataaagacagtgagaggccctcagggatccctgagcgattctctggctccagctcagggacaacagtcacgttgaccatcagtgcagtccaggcagaagatgaggctgactattactgtcaatcagcggacagcagtggtacttatgacgtgttcggcggagggaccaggctgaccgtcc

SEQ ID NO: 11390 - DNA, 330 bp, Homo sapiens
cagtctgtgctgactcagccaccctcagcgtctgcgacccccggacagaaggtcaccatctcttgttctggaagcaagtccaatatcggaaataatcatgtatactggtaccagcagtttccaggaacggccccgaaactcctcatctatagggatgatcagcggccctcaggggtccctgaccgattctctggctccaagtctgacacctcagcctccctggccatcagtggactccggtccgaggatgaggctgattattactgtgcagcctgggatgacagcctgagtggtcgggtgttcggcggagggaccaagctgaccgtccta

SEQ ID NO: 11391 - DNA, 330 bp, Homo sapiens
cagtctgtgctgactcagccaccctcagcgtctgcgacccccggacagaaggtcaccatctcttgttctggaagcaactccaacatcggaaataatcatgtatactggtaccagcagtttccaggaacggccccgaaactcctcatctatagggatgatcagcggccctcaggggtccctgaccgattctctggctccaagtctgacacctcagcctccctggccatcagtggactccggtccgaggatgaggctgattattactgtgcagcctgggatgacagcctgagtggtcgggtgttcggcggagggaccaagttgaccgtccta

SEQ ID NO: 11392 - DNA, 322 bp, Homo sapiens
gacatccagatgacccagtctccatcctccctgtctgcatctgtgggagacagagtcaccatcacttgccaggcgagtcaggacattagcaactatttaaattggtatcagcagaaaccagggaaagcccctaagctcctgatctatgctgcatccactttgcaaagtggggtcccatcaaggttcagcggcagtggatctgggacagaattcactctcacaatcatcaccctgcaggctgaagactttgcaactgattactgtctacagcataatagttacttctggacgttcggccaagggaccaaggtggaaatcaaac

SEQ ID NO: 11393 - DNA, 322 bp, Homo sapiens
gacatccagatgacccagtctccatcctccctgtctgcatctgtgggagacagagtcaccatcacttgccaggcgagtcaggacattagtaaatatttaagttggtatcagcagaaaccagggaaagcccctaacctcctgatctacgatgcgtccaatttggaagcaggggtcccatcaaggttcagtggaagtggatctgggacagattttactttcaccatcagcagtctgcaacctgaagatattgcgtcatattactgtcaacagtatgataatctccctctcactttcggcggagggaccaaggtggagatcaaac

SEQ ID NO: 11394 - DNA, 322 bp, Homo sapiens
gacatccagatgacccagtctccatcctccctgtctgcatctgtaggagacagagtcaccatcacttgccgggcaagtcagagcattagcagttatttaaattggtatcagcagaaaccagggaaagcccctaagctcctgatctatgctgcatccagtttgcaaagtggggtcccatcaaggttcagtggcagtggatctgggacagatttcactctcaccatcagcagtctgcaacctgaagattttgcaacttactactgtcaacagagttacactaccccgtggacgttcggccaagggaccaaggtggaaatcaaac

SEQ ID NO: 11395 - DNA, 322 bp, Homo sapiens
gacatccagatgacccagtctccatcctccctgtctgcatctgtaggagacagagtcaccatcacttgccgggcaagtcagagcattagcagctatttaaattggtatcagcagaaaccagggaaagcccctaagctcctgatctatgctgcatccagtttgcaaagtggggtcccatcaaggttcagtggcagtggatctgggacagatttcactctcaccatcagcagtctacaacctgaagattttgcgacttactactgtcaacagagttacagtacccttttcactttcggccctgggaccaaagtggatatcaaac

SEQ ID NO: 11396 - DNA, 322 bp, Homo sapiens
gacatccagatgacccagtctccatcctccctgtctgcatctgtaggagacagagtcaccatcacttgccgggcgagtcagggcattagcaattatttagcctggtatcagcagaaaccagggaaagttcctaagctcctgatctatgctgcatccactttgcattcaggggtcccatctcggttcagtggcagtggatctgggacagatttcactctcaccatcagcagcctgcagcctgaagatgttgcaacttattactgtcaaaagtatagcagtgccccgtggacgttcggccaagggaccaaggtggaaatcaaac

SEQ ID NO: 11397 - DNA, 322 bp, Homo sapiens; identical to SEQ ID NO: 11396

SEQ ID NO: 11398 - DNA, 331 bp, Homo sapiens
cagtctgccctgattcagcctccctccgcgtccgggtctcctggacagtccgtcaccatctcctgcactggaaccagcagtgacgttggtggttatgagtatgtctcctggttccaacagcacccaggcaaagcccccaaactcatgatttatggggtcagtaagcggccctcaggggtccctgatcgcttctctggctccaagtctggcaacacggcctccctgaccgtctctgggctccaggctgaggatgaggctcattattactgcggctcagatgcaggcagcaacaattttgtcttcggaactgggaccaaggtcaccgtcctag

SEQ ID NO: 11399 - DNA, 331 bp, Homo sapiens
cagtctgccctgattcagcctccctccgcgtccgggtctcctggacagtccgtcaccatctcctgcactggaaccagcagtgacgttggtggttataagtatgtctcctggtaccaacagcacccaggcaaagcccccaaactcatgatttatgaggtcagtaagcggccctcaggggtccctgatcgcttctctggctccaagtctggcaacacggcctccctgaccgtctctgggctccaggcagaggatgaggctgattactactgcagctcagatgcaggcagcaacaattttgtcttcggaactgggaccaaggtcagcgtcctag

SEQ ID NO: 11400 - DNA, 331 bp, Homo sapiens
cagtctgccctgactcagcctgcctccgtgtctgggtctcctggacagtcgatcaccatctcctgcactggaaccaccagtgatgttgggagctataaccttgtctcctggtaccaacagcacccaggcaaagcccccaaactcatgatttatgagggcagtaagcggccctcaggggtttctaatcgcttctctggctccaagtctggcaacacggcctccctgacaatctctgggctccaggctgaggacgaggctgattattactgctactcatatgcaggtagtagcacttgggtgttcggcggagggaccaagctgaccgtcctag

SEQ ID NO: 11401 - DNA, 320 bp, Homo sapiens
gacatccagatgacccagtctccatcctccctgtctgcatctgtaggagacagagtcaccatcacttgccaggcgagtcaggacattagcaactatttaaattggtatcagcagaaaccagggaaagcccctaagctcctgatctacgatgcatccaatttggaaacaggggtcccatcaaggttcagtggaagtggatctgggacagattttactttcaccatcagcagcctgcagcctgaagatattgcaacatattactgtcaacagtatgataatctcccgaacttttggccaggggaccaagctggagatcaaac

SEQ ID NO: 11402 - DNA, 328 bp, Homo sapiens
gaaattgtgttgacacagtctccagccaccctgtctttgtctccaggggaaagagccaccctctcctgcagggccagtcagagtgttagcaacttcttagcctggtaccaacagacacctggccaggctcccaggctcgtcatctatgacgcatccaacagggcccctggcatcccagccaggttcagtggcagtgggtctgggacagacttcactctcaccatcagcagcctagagcctgaagattttgcagtttattactgtcaccagcgtagcaactggcctcctgcgctcactttcggcggagggaccaaggtggagatcgaac

SEQ ID NO: 11403 - DNA, 328 bp, Homo sapiens
gaaattgtgttgacacagtctccagccaccctgtctttgtctccaggggaaagagccaccctctcctgcagggccagtcagagtgttagcagctacttagtctggtaccaacagaaacctggccaggctcccaggctcctcatctatgatgcatccaacagggccactggcatcccagccaggttcagtggcagtgggtctgggacagacttcactctcaccatcagcagcctagagcctgaagattttgcagtttattactgtcaccagcgtagcaactggcctcctgcgctcactttcggcggagggaccaaggtggagatcaaac

SEQ ID NO: 11404 - DNA, 331 bp, Homo sapiens
cagtctgccctgactcagcctgcctccgtgtctgggtctcctggacagtcgatcaccatctcctgcactggaaccagcagtgatgttgggagttataaccttgtctcctggtaccaacagcacccaggcaaagcccccaaactcatgatttatgagggcagtaagcggccctcaggggtttctaatcgcttctctggctccaagtctggcaacacggcctccctgacaatctctgggctccaggctgaggacgaggctgattattactgctgctcatatgcaggtagtagcacttatgtcttcggaactgggaccaaggtcaccgtcctag

SEQ ID NO: 11405 - DNA, 322 bp, Homo sapiens; identical to SEQ ID NO: 10725

SEQ ID NO: 11406 - DNA, 337 bp, Homo sapiens
gatattgtgatgacccagactccactctcctcacctgtcacccttggacagccggcctccatctcctgcacgtctagtcaaagcctcgtacacggtgatggaaacatctacttgagttggcttcagcagaggccaggccagcctccaagactcctaatttataagatttctaaccggttctctggggtcccagacagattcagtggcagtggggcagggacagatttcacactgaaaatcaccagggtggaagctgaggatgtcggggtttattactgcatgcaagctacacaatttccgtacacttttggccaggggaccaagctggagatcaaac

SEQ ID NO: 11407 - DNA, 337 bp, Homo sapiens
cagtctgccctgactcagcctcgctcagtgtccgggtctcctggacagtcagtcaccatctcctgcactggaaccagcagtgatgttggtggttataactatgtctcctggtaccaacagcacccaggcaaagcccccaaactcatgatttatgatgtcagtaagcggccctcaggggtccctgatcgcttctctggctccaagtctggcaacacggcctccctgaccatctctgggctccaggctgaggatgaggctgattattactgctgctcatatgcaggcagctacactgccctttatgtcttcggaactgggaccaaggtcaccgtcctag

SEQ ID NO: 11408 - DNA, 334 bp, Homo sapiens
cagtctgtgctgactcagccaccctcagcgtctgggacccccgggcagagggtcaccatctcttgttctggaagcagctccaacatcggaagtaattatgtatactggtaccagcagctcccaggaacggcccccaaactcctcatctataggaataatcagcggccctcaggggtccctgaccgattctctggctccaagtctggcacctcagcctccctggccatcagtgggctccggtccgaggatgaggctgattattactgtgcagcatgggatgacagcctgagtggtccgactgtcttcggaactgggaccaaggtcaccgtcctag

SEQ ID NO: 11409 - DNA, 329 bp, Homo sapiens
cagtctgtggtgactcagtcaccctcagtttctgggactcccgggcagagggtcaccatttcttgtgctggaagtaactccaacgtcggagtcaatctggtcgactggtatcaacaattgtccggtatggcccccaaattgatcatttctaatggggatgagaggccaacaggagtctctgagcgattctctgcctccaagtccggcaccatagccaccctggccatcagcggcctccggcccgaggatgaggcttactatcactgtttggtctttgataacactttcgttggtcgaatattcggcggagggacgaagctgaccgtcct

SEQ ID NO: 11410 - DNA, 316 bp, Homo sapiens
gacatccagatgacccagtctccatcctccctgtctgcatctgtaggagacagagtcaccatcacttgccaggcgagtcaggacattagcaactatttaaattggtatcagcagaaaccagggaaagtccctaagctcctgatctacgatgcatccaatttggaaacaggggtcccatcaaggttcagtggaagtggatctgggacagattttactttcaccatcagcagcctgcagcctgaagatattgcaacatattactgtcaacagtatgatattcttctcactttcggcggagggaccagggtggagatca

SEQ ID NO: 11411 - DNA, 322 bp, Homo sapiens
gccatccggatgacccagtctccatcctcattctctgcatctacaggagacagagtcaccatcacttgtcgggcgagtcagggtattagcagttatttagcctggtatcagcaaaaaccagggaaagcccctaagctcctgatctatgctgcatccactttgcaaagtggggtcccatcaaggttcagcggcagtggatctgggacagatttcactctcaccatcagctgcctgcagtctgaagattttgcaacttattactgtcaacagtattatagttaccctatcactttcggccctgggaccaaagtggatatcaaac

SEQ ID NO: 11412 - DNA, 322 bp, Homo sapiens
gacatccagatgacccagtctcctcccaccctgtctgcatctgtaggagacagagtcaccatcacttgccgggccagtcagagtattagtggctggttggcctggtatcagcagaaagtagggaaagcccctaaactcctgatctataaggcgtctactttagaaagtggggtcccatcaaggttcagcggcagtggatctgggacagagtccactctcaccatcagcagcctgcagcctgatgattttgcaacttattactgccaacagtataatagttacccgctcactttcggcggagggaccaaggtggagatcaaac

SEQ ID NO: 11413 - DNA, 322 bp, Homo sapiens
gaaattgtgctgactcagtctccagactttcagtctgtgactccaaaggagaaagtcaccatcacctgccgggccagtcagagcattggtagtagcttacactggtaccagcagaaaccagatcagtctccaaagctcctcatcaagtatgcttcccagtccatctcaggggtcccctcgaggttcagtggcagtggatctgggacagatttcaccctcaccatcaatagcctggaagctgaagatgctgcagcgtattactgtcatcagagtagtagtttaccccacactttcggcggagggaccaaggtggagatcaaac

SEQ ID NO: 11414 - DNA, 322 bp, Homo sapiens; identical to SEQ ID NO: 10931

SEQ ID NO: 11415 - DNA, 325 bp, Homo sapiens
tcttctgagctgactcaggaccctgttgtgtctgtggccttgggacagacagtcaggatcacatgccaaggagacagcctcagaagctattatgcaagctggtaccagcagaagccaggacaggcccctgtacttgtcatctatggaaaaaacaaccggccctcagggatcccagaccgattctctggctccagctcaggaaacacagcttccttgaccatcactggggctcaggcggaagatgaggctgactattactgtaactcccgggacagcagtggtaaccaatgggtgttcggcggagggaccaagatgaccgtcctag

SEQ ID NO: 11416 - DNA, 331 bp, Homo sapiens
cagtctgccctgactcagcctgcctccgtgtctgggtctcctggacagtcgatcaccatctcctgcactggaaccagcagtgatgttgggagttataaccttgtctcctggtaccaacagcacccaggcaaagcccccaaactcatgatttatgaggacagtaagcggccctcaggggtttctaatcgcttctctggctccaagtctggcaacacggcctccctgacaatctctgggctccaggctgaggacgaggctgattattactgctgctcatatgcaggtagtagcacaagggtgttcggcggagggaccaagctgaccgtcctag

SEQ ID NO: 11417 - DNA, 323 bp, Homo sapiens
gacatccagatgacccagtctccttccaccctgtctgcatctgtaggagacagagtcaccatcacttgccgggccagtcagagtattagtagctggttggcctggtatcagcagaaaccagggaaagcccctaagctcctgatctatgctgcatccagtttgcaaagtggggtcccatcaaggttcagtggcagtggatctgggacagatttcaccctcaccatcaatagcctggaagctgaagatgctgcaacgtattactgtcatcagagtagtagtttactcgctcactttcggcggagggaccaaggtggagatcaaac

SEQ ID NO: 11418 - DNA, 325 bp, Homo sapiens
gaaattgtgttgacgcagtctccaggcaccctgtctttgtctccaggggaaagagccaccctctcctgcagggccagtcagagtgttagcagcagctacttagcctggtaccagcagaaacctggccaggctcccaggctcctcatctatggtgcatccagcagggccactggcatcccagacaggttcagtggcagtgggtctgggacagacttcactctcaccatcagcagactggagcctgaagattttgcagtgtattactgtcagcagtatggtagctcattattcactttcggccctgggaccaaagtggatatcaaac

SEQ ID NO: 11419 - DNA, 319 bp, Homo sapiens
tcctatgagctgacacagccaccctcggtgtcagtgtccccaggacagacggccaggatcacctgctctggagatgcattgccaaagcaatatgcttattggtaccagcagaagccaggccaggcccctgtgctggtgatatataaagacagtgagaggccctcagggatccctgagcgattctctggctccagctcagggacaacagtcacgttgaccatcagtggagtccaggcagaagacgaggctgactattactgtcaatcagcagacagcagtgggagggtcttcggaactgggaccaaggtcaccgtcctag

SEQ ID NO: 11420 - DNA, 320 bp, Homo sapiens
catccagatgacccagtctccatcctccctgtctgcatctgtaggagacagagtcgccatcacttgccgggcgagtcagggcattagcaattatttagcctggtttcagcagaaaccagggaaagttcctaagctcctgatctatgctgcatccactttgcaatcaggagtcccatctcggttcagtggcaatggatctgggacagatttcactctctccatcagcagcctgcagcctgaagatgttgcaacttattactgtcaaaagtataacaatgcccctcggactttcggccctgggaccaaagtggatctcaaac

SEQ ID NO: 11421 - DNA, 325 bp, Homo sapiens
gaaacagtgatgacgcagtctccagccgccctgtctgtgtctccaggggaaagagtcaccctctcctgcagggccagtcagactgttagcagcaacttagcctggtaccagcagaaacctggccaggctcccaggctcctcatccatggtgcatccaccagggccactggtgtcccagccaggttcagtggcagtgggtctgggacagagttcactctcaccatcagcagcctgcagtctgaagattttgcagtttattactgtcagcagtataataactggcctccgatcaccttcggccaagggacacgactggagattaaac

SEQ ID NO: 11422 - DNA, 319 bp, Homo sapiens
tcctatgagctgactcagccaccctcagtgtccgtgtccccaggacagacagccagcatcacctgctctggcgataaattgggggatagatatgcttgctggtatcagcagaagccaggccagtcccctgtgctggtcatctatcaagatagcaagcggccctcagggatccctgagcgattctctggctccaactctgggaacacagccactctgaccatcagcgggacccaggctatggatgaggctgactattactgtcaggcgtgggacagcagcactgtggtattcggcggagggaccaagctgaccgtcctag

SEQ ID NO: 11423 - DNA, 322 bp, Homo sapiens
gacatccagatgacccagtctccatcctccctgtctgcatctgtaggagacagagtcaccatcacttgccgggcaagtcagagcattagcagctatttaaattggtatcagcagaaaccagggaaagcccctaagctcctgatctatgctgcatccagtttgcaaagtggggtcccatcaaggttcagtggcagtggatctgggacagatttcactctcaccatcagcagtctgcaacctgaagattttgcaacttactactgtcaacagagttacagtacccctcgcactttcggcggagggaccaaggtggagatcaaac

SEQ ID NO: 11424 - DNA, 322 bp, Homo sapiens
gaaattgtgttgacgcagtctccaggcaccctgtctttgtctccaggggaaagagccaccctctcctgcagggccagtcagagtgttagcagcagctacttagcctggtaccagcagaaacctggccaggctcccaggctcctcatctatggtgcatccagcagggccactggcatcccagacaggttcagtggcagtgggtctgggacagacttcactctcaccatcagcagactggagcctgaagattttgcagtgtattactgtcagcagtatggtcgctcacccctcactttcggccctgggaccaaagtggatatca

SEQ ID NO: 11425 - DNA, 337 bp, Homo sapiens
gatattgtgatgactcagtctccactctccctgcccgtcacccctggagagccggcctccatctcctgcaggtctagtcagagcctcctgcatagtaatggatacaactatttggattggtacctgcagaagccagggcagtctccacagctcctgatctatttgggttctaatcgggcctccggggtccctgacaggttcagtggcagtggatcaggcacagattttacactgaaaatcagcagagtggaggctgaggatgttggggtttattactgcatgcaagctctacaaactcccttcagttttggccaggggaccaagctggagatcaaac

SEQ ID NO: 11426 - DNA, 322 bp, Homo sapiens
tcctatgagctgactcagccaccctcagtgtccgtgtccccaggacagacagccagcatcacctgctctggagataaattgggggataaatatgcttgctggtatcagcagaagccaggccagtcccctgtgctggtcatctatcaagatagcaagcggccctcagggatccctgagcgattctctggctccaactctgggaacacagccactctgaccatcagcgggacccaggctatggatgaggctgactattactgtcaggcgtgggacagcagcactgcctgggtgttcggcggagggaccaagctgaccgtcctag

SEQ ID NO: 11427 - DNA, 322 bp, Homo sapiens; identical to SEQ ID NO: 851

SEQ ID NO: 11428 - DNA, 322 bp, Homo sapiens; identical to SEQ ID NO: 3452

SEQ ID NO: 11429 - DNA, 322 bp, Homo sapiens
gaaatagtgatgacgcagtctccagccaccctgtctgtgtctccaggggaaagagccaccctctcctgcagggccagtcagagtgttagcagcaacttagcctggtaccagcagaaacctggccaggctcccaggctcctcatctatggtgcatccaccagggccactggtatcccagccaggttcagtggcagtgggtctgggacagagttcactctcaccatcagcagcctgcagtctgaagattttgcagtttattactgtcagcagtataataactggccttggacgttcggccaagggaccaaggtggaaatcaaac

SEQ ID NO: 11430 - DNA, 322 bp, Homo sapiens
gacatccagatgacccagtctccttccaccctgtctgcatctgtaggagacagagtcaccatcacttgccgggccagtcagagtattagtagctggttggcctggtatcagcagaaaccagggaaagcccctaagctcctgatctataaggcgtctagtttagaaagtggggtcccatcaaggttcagcggcagtggatctgggacagaattcactctcaccatcagcagcctgcagcctgatgattttgcaacttattactgccaacagtataatagttattctccgactttcggcggagggaccaaggtgcagatcaaac

SEQ ID NO: 11431 - DNA, 331 bp, Homo sapiens
cagtctgtgctgactcagccaccctcaacgtccgcgacccccgggcagagggtcaccatctcttgttctggaagcagctccgacatcgaaactaatactgtcagctggtaccagcacctcccaggaacggcccccaaactcctcatctataataataatgagcggccctcaggggtccctgaccgattctctggctccaagtctggcacctctgcctccctggccatcagtgggctccagtctgaggatgaggctgattattactgtgcagcgtggcatgacagtctcaatgcttgggtgttcggcagagggacctacctgaccgtcctag

SEQ ID NO: 11432 - DNA, 331 bp, Homo sapiens
gaagttgtgttgacgcagtctccaggcaccctgtctttgtccccgggggaaaaggccaccctctcctgcagggccagtcagagtgtcagcagcagcaaccgcctagcctggtaccagcagaaacctggccaggctcccaggctcctcatctatggtgcatccagcagggccactggcatcccagacaggttcagtggcagtgggtctgggacagactttactctcaccatcagcagactggagcctgaagattctgcagtgtattactgtcagcaatatagtggctcacctccctacacttttggccaggggaccaaactagagatcaaac

SEQ ID NO: 11433 - DNA, 329 bp, Homo sapiens
cagtctgccctgactcagcctcgctcagtgtccgggtctcctggacagtcagtcaccatctcctgtactggaaccaacagtgatgttggtggttataactatgtctcctggtaccaacaacacccaggcaaagcccccaaatttttgatttatgatgtcaatgagcggccctcaggggtccctgatcgcttctctggctccaagtctggcaacacggcctccctgaccatctctgggctccaggctgaagatgaggctgattattactgctgctcatatgcaggcagctactcgtgggtcttcggcggagggacccagttgaccgtcct

SEQ ID NO: 11434 - DNA, 322 bp, Homo sapiens
gacatccagatgacccagtctccttccaccctgtctgcatctgtaggagacagagtcaccatcacttgccgggccagtcagagtattagtagctggttggcctggtatcagcagaaaccagggaaagcccctaagctcctgatctataaggcgtctagtttagaaagtggggtcccatcaaggttcagcggcagtggatctgggacagaattcactctcaccatcagcagcctgcagcctgatgattttgcaacttattactgccaacagtataatagttacacgctcactttcggcggagggaccaaggtggagatcaaac

SEQ ID NO: 11435 - DNA, 328 bp, Homo sapiens
cagtctgccctgactcagcctgcctccgtgtctgggtctcctggacagtcgatcaccatctcctgcactggaaccagcagtgatgttgggaattataattttgtctcctgatatcaatcgtatttaggcaaagcccccaaagtcaggctttatgagggcaattagcggccctcgggagtttctcatcgcttctgtgcctccaggtctggcagcacggcctccctgaccatctctgggttccaggctgacgaccagactgatgactattcctactcatatgcagccggcagtcttgggtgctcggcggagggaccaacctgaccgtcct

SEQ ID NO: 11436 - DNA, 334 bp, Homo sapiens
cagtctgtgttgacgcagccgccctcagtgtctgcggccccaggacagacggtcaccatctcctgctctggaggcagctccaacattgggagtaatcatgtatcctggtaccagcatctcccaggaacagcccccaaactcctcatctatgaaaataataagcgaccctcagggattcctgaccgattctctggctccaagtctggcacgtcagccaccctgggcatcaccggactccagactggggacgaggccgattattactgcggaacatgggatagaagcctgagtcctggaggggtgttcggcggagggaccaagctgaccgtcctag

SEQ ID NO: 11437 - DNA, 340 bp, Homo sapiens
gacatcgtgatgacccagtctccagactccctggctgtgtctctgggcgagagggccaccatcaactgcaagtccagccagagtgttttatacagctccaacaataagaactacttagcttggtaccagcagaaaccaggacagcctcctaagctgctcatttactgggcatctacccgggaatccggggtccctgaccgattcagtggcagcgggtctgggacagatttcactctcaccatcagcagcctgcaggctgaagatgtggcagtttattactgtcagcaatattatagtactcctcttacttttggccaggggaccaagctggagatcaaac

SEQ ID NO: 11438 - DNA, 325 bp, Homo sapiens; identical to SEQ ID NO: 3887

SEQ ID NO: 11439 - DNA, 322 bp, Homo sapiens
gccatccggatgacccagtctccatcctcattctctgcatctacaggagacagagtcaccatcacttgtcgggcgagtcagggtattagcagttatttagcctggtatcagcaaaaaccagggaaagcccctaagctcctgatctatgctgcatccactttgcaaagtggggtcccatcaaggttcagcggcagtggatctgggacagatttcactctcaccatcagctgcctgcagtctgaagattttgcaacttattactgtcaacagtattatagttaccctcctactttcggcggagggaccaaggtggagatcaaac

SEQ ID NO: 11440 - DNA, 334 bp, Homo sapiens
cagtctgtgctgacgcagccgccctcagtgtctggggccccagggcagagggtcaccatctcctgcactgggagcagctccaacatcggggcaggttatgatgtacactggtaccagcagcttccaggaacagcccccaaactcctcatctatgctaacaacaatcggccctcaggggtccctgaccgattatctgcctccaagtctggcacctcagcctccctggccatcactgggctccagcctgaggacgaggctgattattactgccagtcctatgacagcggcctgagtggtatgatattcggcggagggaccaacctgaccgtcctag

SEQ ID NO: 11441 - DNA, 322 bp, Homo sapiens
tcctatgagctgactcagccaccctcagtgtccgtgtccccaggacagacagccagcatcacctgctctggagataaattgggggataaatatgcttgctggtatcagcagaagccaggccagtcccctgtgctggtcatctatcaagatagcaagcggccctcagggatccctgagcgattctctggctccaactctgggaacacagccactctgaccatcagcgggacccaggctatggatgaggctgactattactgtcaggcgtgggacagcagcactgattgggtgttcggcggagggaccaagctgaccgtcctag

SEQ ID NO: 11442 - DNA, 322 bp, Homo sapiens
gacatccagatgacccagtctccatcctccctgtctgcatctgtaggagacagagtcaccatcacttgccgggcaagtcagagcattagcacctatttaagttggtatcagcagaaaccagggaaagcccctaagctcctgatctatgctgcatccagtttgcaaagtggggtcccatcaaggttcagtggcagtggatctgggacagatttcactctcaccatcagcagtctgcaacctgaagattttgcaacttactactgtcaacagagttacatttttcctcggacgttcggccaagggaccaaggtggaaatcaaac

SEQ ID NO: 11443 - DNA, 322 bp, Homo sapiens
gaaatagtgatgacgcagtctccagccaccctgtctgtgtctccaggggaaagagccaccctctcctgcagggccagtcagagtgttagcagcaacttagcctggtaccagcagaaacctggccaggctcccaggctcctcatctatggtgcatccaccagggccactagcatcccagccaggttcagtggcagtgggtctgggacagagttcactctcaccatcagcagcctgcagtctgaagattttgcagtttattactgtcagcagtataataactggcctttcacttttggccaggggaccaagctggagatcaaac

SEQ ID NO: 11444 - DNA, 325 bp, Homo sapiens
gaaattatattgacgcagtctccaggcaccctgtctttgtctccaggggaaagagccaccctctcctgcagggccagtcagagtattggcagtcgctttgcctggtaccagcagaaacctggccaggctcccaggctcgtcatctatggaatatccaacagggccaccggcatcccagacaggttcagtggcagtgggtctgggacagacttcactctcactatcagcagactggagcctgaagattttggagtgtattactgtcagcagcatggtggctcacctacatatacttttggccaggggaccaagctggagatcaaac

SEQ ID NO: 11445 - DNA, 340 bp, Homo sapiens
gacatcgtgatgacccagtctccagactccctggctgtgtctctgggcgagagggccaccatcaactgcaagtccagccagagtgttttctacagctccaacaataagaactacttagcttggtaccagcagaaaccaggacagcctcctaagctgctcatttactgggcatctattcgggaatccggggtccctgaccgattcagtggcagcgggtctgggacagatttcactctcaccatcagcagcctgcaggctgaagatgtggcagtttattactgtcagcaatattatagtactcctcgaacgttcggccaagggaccaaggtggaaatcaaac

SEQ ID NO: 11446 - DNA, 325 bp, Homo sapiens
gacatccagatgacccagtctccatcctccctgtctgcatctgtaggagacagagtcaccatcacttgccgggcaagtcagagcattagcagctatttaaattggtatcagcagaaaccagggaaagcccctaagctcctgatctatgctgcatccagtttgcaaagtggggtcccatcaaggttcagtggcagtggatctgggacagatttcactctcaccatcagcagtctgcaacctgaagattttgcaacttactactgtcaacagagttacagtacccctcagggtacttttggccaggggaccaagctggagatcaaac

SEQ ID NO: 11447 - DNA, 328 bp, Homo sapiens
gaaattgtgttgacgcagtctccaggcaccctgtctttgtctccaggggaaagagccaccctctcctgcagggccagtcagagtattagcggcagccgcttagcctggtaccagcagaaacctggccaggctcccaggctcctcatctatggtgcatccagcagggccaccggcatcccagacaggttcagtggcagtgggtctgggacagacttcactctcactatcagcagactggagcctgaagattgtgcagtgtattactgtcagtactatgatggttcaactctgtacacttttggccaggggaccattctggagatcaaac

SEQ ID NO: 11448 - DNA, 322 bp, Homo sapiens
gaaatggtgatgacgcagtctccagccaccctgtctgtgtctccaggggaaagagccaccctctcctgcagggccagtcagagtgttagcagcaacttagcctggtatcagcagaaacctggccaggctcccaggctcctcatctatggtgcatccaccagggccactggtatcccagccaggttcagtggcagtgggtctgggacagagttcactctcaccatcagcagcctgcagtctgaagattttgcagtttattactgtcagcagtataataagtggcctctcactttcggcggagggaccaaggtggagatcaaac

SEQ ID NO: 11449 - DNA, 325 bp, Homo sapiens; identical to SEQ ID NO: 883

SEQ ID NO: 11450 - DNA, 328 bp, Homo sapiens
gacatccagatgacccagtctccatcctccctgtctgcatctgtaggagacagagtcaccatcacttgccaggcgagtcaggacattagcaactatttaaattggtatcagcagaaaccggggaaagcccctaagctcctgatctacgatgcatccaatttggaagcaggggtcccatcaaggttcagtggaagtggatctgggacagattttactttcaccatcagcagcctgcagcctgaagatattgcaacatattactgtcaacagtatcataatctccctccgagtctcactttcggccctgggaccaaagtgggtatcaaac

SEQ ID NO: 11451 - DNA, 321 bp, Homo sapiens
gacatccagatgacccagtctccatcttccgtgtctgcatctgtaggagacagagtctccatcgcttgtcgggcgagtcagggtattagcagctggttagccttgtatcagcagaaaccagggagagcccctaaactcctgatctatggtacatccagtgtgcaaggtggtgtcccatcaaggttcagcggcagtggatctgggacagatttcactctcaccatcagcaccctgcagcctgaagattttgcaacttactattgtcaacaggctaacagtttcccctctcactttcggcggagggaccaaggtggagatcaa

SEQ ID NO: 11452 - DNA, 331 bp, Homo sapiens
cagtctgtgttgacgcagccgccctcagtgtctgcggccccaggacagaaggtcaccatctcctgctctggaagcagctccaacattgggtataattatgtatcctggtaccagcagctcccaggaacagcccccaaactcctcatctctgaaaataataagcgaccctcagggattcctgaccgattctctggctccaagtctggcacgtcagccaccctgggcatcaccggactccagactggggacgaggccgattattactgcggagcatgggatagcagcctgaatggttgggtgttcggcggagggaccaagctgaccgtcctag

SEQ ID NO: 11453 - DNA, 337 bp, Homo sapiens
gatgttgtgatgactcagtctccactctccctgcccgtcacccttggacagccggcctccatctcctgcagatctagtcaaagcctcgtatacagtgatggaaacacctatttgaattggtttcagcagaggccaggccaatctccaaggcgcctgttgtataaggtttctaaccgggactctggggtcccagacagattcagcggcagtgggtcaggcactgatttcacactgaaaatcagcagggtggaggctgaggatgttggggtttattactgcgtgcaaggtacatactggccttggacgttcggccaagggaccagggtggaaatcaaac

SEQ ID NO: 11454 - DNA, 331 bp, Homo sapiens
cagactgtggtgacccaggagccatccttctctgtgtcccctggagggacggtcacactcacttgtggcttgacctctgactcagtctcttctgcttactaccccacctggtaccagcagaccccaggccaggctccacgcacgctcatctacgacacacacactcgcgcttctggggtccctgatcgtttctccggctccatccttgggaacaaagctgccctcaccatcacgggggcccaggcagatgatgagtctgactattactgtgtactatatatggggagtggctttcgggtgttcggcggagggaccaggctgaccgtcctag

SEQ ID NO: 11455 - DNA, 322 bp, Homo sapiens; identical to SEQ ID NO: 837

SEQ ID NO: 11456 - DNA, 325 bp, Homo sapiens; identical to SEQ ID NO: 1686

SEQ ID NO: 11457 - DNA, 328 bp, Homo sapiens
gaaattgtgttgacacagtctccagccaccctgtctttgtctccaggggaaagagccaccctctcctgcagggccagtcagagtgttagcagcttcttagcctggtaccaacagaaacctggccaggctcccaggctcctcatctatgatgcatccaacagggccactggcatcccagccaggttcagtggcagtgggtctgggacagacttcactctcaccatcagcagcctagagcctgaagattttgcagtttattactgtcagcagcgtagcaactggcctccgaaggtcactttcggcggagggaccaaggtggagatcaaac

SEQ ID NO: 11458 - DNA, 325 bp, Homo sapiens
gccatccggatgacccagtctccatcctcattctctgcatctacaggagacagagtcaccatcacttgtcgggcgagtcagggtattagcagttatttagcctggtatcagcaaaaaccagggaaagcccctaagctcctgatctatgctgcatccactttgcaaagtggggtcccatcaaggttcagcggcagtggatctgggacagatttcactctcaccatcagctgcctgcagtctgaagattttgcaacttattactgtcaacagtattatagtttcccttagctcactttcggcggagggaccaaggtggagatcaaac

SEQ ID NO: 11459 - DNA, 319 bp, Homo sapiens; identical to SEQ ID NO: 3579

SEQ ID NO: 11460 - DNA, 322 bp, Homo sapiens
gaaatagtgatgacgcagtctccagccaccctgtctgtgtctccaggggatagagccaccctctcctgctgggccagtcacagtattaggggcaacttagcctggtaccagctgagacctggccaggctccccgcctcctcatctacgctgcatccacccgggccgctggaatcccagccagattcagtggccgtgggtctgggacagacttcactctcaccatcagcagcctgcagtctgaagattttgcagtttactactgtcagcagcatgataactggcctttcactttcggccctgggaccaaagtggaagtcaaac

SEQ ID NO: 11461 - DNA, 328 bp, Homo sapiens
gaaattgtgttgacgcagtctccaggcaccctgtctttgtctccaggggaaagagccaccctctcctgcagggccagtcagagtgttagcagcagctccttagcctggtaccagcagaagcctggccaggctcccaggctcctcatctttggtgcatccagcagggccactggcatcccagacaggttcagtggcagtgggtctgggacagacttcactctcaccatcagcagactggagcctgaagattttgcagtgtattactgtcagcagtatggtggcgcacccttattcactttcggccctgggaccaaagtggatatcaaac

SEQ ID NO: 11462 - DNA, 319 bp, Homo sapiens
gaaatagtgatgacgcagtctccagccaccctgtctgtgtctccaggggaaagagccaccctctcctgcagggccggtcagagtgttagcagcaacttagcctggtaccagcagaaacctggccaggctcccaggctcctcatctatggtgcatccaccagggccactggtatcccagccaggttcagtggcagtgggtctgggacagagttcactctcaccatcagcagcctgcagtctgaagattttgcagtttattactgtcagcagtataataactggtggacgttcggccaagggaccaaggtggaaatcaaac

SEQ ID NO: 11463 - DNA, 319 bp, Homo sapiens
gacatccagatgacccagtctccttccaccctgtctacatctgtaggagacagagtcaccatcacttgccgggccaatcagagtattagtaactggttggcctggtatcagcagaaaccagggaaagccccaaaactcctgatctataaggcgtctagtttagaaagtggggtcccatcaaggttcagcggcagtggatctgggacagaattcagtctcaccatcagcagcctgcagcctgatgattttgcaacttattactgccaacaatataaaagttattacacttttggccaggggaccaagctggagatcaaac

SEQ ID NO: 11464 - DNA, 337 bp, Homo sapiens; identical to SEQ ID NO: 10995

SEQ ID NO: 11465 - DNA, 328 bp, Homo sapiens
gaaattgtgttgacgcagtctccaggcaccctgtctttgtctccaggggaaagagccaccctctcctgcagggccagtcagagtgttagcagcagctacttagcctggtaccagcagaaacctggccaggctcccaggctcctcatctatggtgcatccagcagggccactggcatcccagacaggttcagtggcagtgggtctgggacagacttcactctcaccatcagcagactggagcctgaagattttgcagtgtattactgtcagcagtatggtagctcacctccgaacagttttggccaggggaccaagctggagatcaaac

SEQ ID NO: 11466 - DNA, 325 bp, Homo sapiens
tcctatgagctgacacagccaccctcggtgtcagtgtccccaggacaaacggccaggatcacctgctctggagatgcactgccaaaaaaatatgcttattggtaccagaagaagtcaggccaggcccctgtgctggtcatctatgaggacagcaaacgaccctccgggatccctgagagattctctggctccggctcagggacaatggccaccttgactatcagtggggcccaggtggaggatgaagctgactactactgttactcaacagaaagcagtggtaatcagagggtgttcggcggagggaccaagttgaccgtcctag

SEQ ID NO: 11467 - DNA, 334 bp, Homo sapiens
cagtctgtgctgactcagccaccctcagcgtctgggacccccgggcagagggtcaccatctcttgttctggaagcagctccaatatcggaagtaatactgtaaactggtaccagcagctcccaggaacggcccccaaactcctcatttatactaataatcagcggccctcagaggtccctgaccgattctctggctccaagtctggcacctcagcctccctggccatcagtgggctccagtctgaggatgaggctgattattactgtgcagcatgggatgacagcctgaatggccattgggtgttcggcggagggaccaagctgaccgtcctag

SEQ ID NO: 11468 - DNA, 322 bp, Homo sapiens
gacatccagatgacccagtctccatcctccctgtctgcatctgtaggagacagagtcaccatcacttgccgggcaagtcagagcattagcagctatttaaattggtatcagcagaaaccagggaaagcccctaagctcctgatctatgctgcatccagtttgcaaagtggggtcccatcaaggttcagtggcagtggatctgggacagatttcactctcaccatcagcagtctgcaacctgaagattttgcaacttactactgtcaacagagttacagtacccgttccgctttcggcggagggaccaaggtggagatcaaac

SEQ ID NO: 11469 - DNA, 337 bp, Homo sapiens
cagtctgccctgactcagcctgcctccgtgtctgagtctcctggacagtcgatcaccatctcctgcactggaaccagcagtgaccttggtggttacacctatgtctcctggtaccaacaacacccaggcaacgcccccaaactcgtgatttatgaggtcactaatcggccctcaggggtttctcatcgcttctctggctccaagtctggcaacacggcctccctgaccatctccgggctccaggctgaggacgaggctgattattactgcagctcatatacaagccgcagcactcccgcttatgtcttcggaagtgggaccaaggtcaccgtcctag

SEQ ID NO: 11470 - DNA, 331 bp, Homo sapiens
cagtctgccctgactcagcctgcctccgtgtctgggtctcctggacagtcgatcaccatctcctgcactggaaccagcagtgacgttggtggttataactatgtctcctggtaccaacagcacccaggcaaagcccccaaactcatgatttatgaggtcagtaatcggccctcaggggtttctaatcgcttctctggctccaagtctggcaacacggcctccctgaccatctctgggctccaggctgaggacgaggctgattattactgcagctcatatacaagcagcagcactctggtgttcggcggagggaccaagctgaccgtcctag

SEQ ID NO: 11471 - DNA, 331 bp, Homo sapiens
cagtctgtgttgacgcagccgccctcagtgtctgcggccccaggacagaaggtcaccatctcctgctctggaagcagctccaacattgggaataattatgtatcctggtaccagcagctcccaggaacagcccccaaactcctcatttatgacaataataagcgaccctcagggattcctgaccgattctctggctccaagtctggcacgtcagccaccctgggcatcaccggactccagactggggacgaggccgattattactgcggaacatgggatagcagcctgagtgctggagtgttcggcggagggaccaagctgaccgtcctag

SEQ ID NO: 11472 - DNA, 325 bp, Homo sapiens; identical to SEQ ID NO: 2371

SEQ ID NO: 11473 - DNA, 334 bp, Homo sapiens
cagtctgtgctgactcagccaccctcagcgtctgggacccccgggcagagggtcaccatctcttgttctggaagcagctccaacatcggaagtaatactgtaaactggtaccagcagctcccaggaacggccccgaaactcctcatctatagtaatgatcagcggccctcaggggtccctgaccgattctctggctccaagtctggcacctcagcctccctggacatcagtggactccagtctgaggatgaggctgattattggtgtgaagcatgggatgacagcctgagtggttcttgggtgttcggcggagggaccaaggtgaccgtcgtag

SEQ ID NO: 11474 - DNA, 331 bp, Homo sapiens
cagtctgccctgactcagcctgcctccgtgtctgggtctcctggacagtcgatcaccatctcctgcactggaaccagcagtgatgttgggagttataacgttgtctcctggtaccaacagcacccagtcaaagcccccaaactcatgatttatgaggtcagtaagcggccctcaggggtttctaatcgcttctctggctccaagtctggcaacacggcctccctgacaatctctgggctccaggctgaggacgaggctgattattactgctgctcatatgcaggtagtagcacttatgtcttcggaactgggaccaaggtcaccgtcctag

SEQ ID NO: 11475 - DNA, 334 bp, Homo sapiens
cagcttgtgctgactcaatcgccctctgcctctgcctccctgggagcctcggtcaagctcacctgcactctgagcagtgggcacagcagctacgccatcgcatggcatcagcagcagccagagaagggccctcggtacttgatgaagcttaacagtgatggcagccacagcaagggggacgggatccctgatcgcttctcaggctccagctctggggctgagcgctacctcaccatctccagcctccagtctgaggatgaggctgactattactgtcagacctggggcactggcattcgggtgttcggcggagggaccaagctgaccgtcctag

SEQ ID NO: 11476 - DNA, 331 bp, Homo sapiens
cagtctgtgctgactcagccaccctcagcgtctgggacccccgggcagagggtcaccatctcttgttctggaagcagctccaacatcggaagtaatactgtaaactggtaccagcagctcccaggaacggcccccaaacccctcatctatagtaaaaatcagcggccctcaggggtccctgaccgattctctggctccaagtctggcacctcagcctccctggccatcagtgggctccagtctgaggatgaggctgattattactgtgcaacatgggatgacagcctgaatggttgggtgttcggcggagggaccaagctgaccgtcctag

SEQ ID NO: 11477 - DNA, 325 bp, Homo sapiens
gaaattgtgttgacgcagtctccaggcaccctgtctttgtctccaggggaaagagccaccctctcctgcagggccagtcagagtgttagcagcaactacttagcctggtaccagcagaaacctggccaggctcccaggctcctcatctatggtgcatccagtagggccactggcatcccagacaggttcagtggcagtgggtctgggacagacttcactctcaccatcagcagactggagcctgaagattttgcagtgtattactgtcagcagtatggtagctcaccgctcactttcggcggagggaccaaggtggagatcaaac

SEQ ID NO: 11478 - DNA, 322 bp, Homo sapiens; identical to SEQ ID NO: 837

SEQ ID NO: 11479 - DNA, 322 bp, Homo sapiens; identical to SEQ ID NO: 1049

SEQ ID NO: 11480 - DNA, 328 bp, Homo sapiens
gaaattgtgttgacacagtctccagccaccctgtctttgtctccaggggaaagagccaccctctcctgcagggccagtcagagtgttagcagctacttagcctggtaccaacagaaacctggccaggctcccaggctcctcatctatgatgcatccaacagggccactggcatcccagccaggttcagtggcactgggtctgggacagacttcactctcaccatcagcagcctagagcctgaagattttgcagtttattactgtcagcagcgtagcaactggcctccgaggctcactttcggcggagggaccaaggtggagatcaaac

SEQ ID NO: 11481 - DNA, 328 bp, Homo sapiens
gaaattgtgttgacacagtctccagccaccctgtctttgtctccaggggaaagagccaccctctcctgcagggccagtcagagtgttagcaacttcttagcctggtaccaacagaaacctggccaggctcccaggctcctcatctatgatgcatccaacagggccactggcatcccagccaggttcagtggcagtgggtctgggacagacttcactctcaccatcagcagcctagagcctgaagattttgcggtttattactgtcagcaacgtagcaactggcctccgaggctcactttcggcggagggaccaaggtggagatcaaac

SEQ ID NO: 11482 - DNA, 328 bp, Homo sapiens
gaaattgtgttgacacagtctccagccaccctgtctttgtctccaggggaaagagccaccctctcctgcagggccagtcagagtgttagcaacttcttagcctggtaccaacaaaaacctggccaggctcccaggctcttcatctatgatgcatcccacagggccactggcatcccagccaggttcagtggcagtgggtctgggacagacttcactctcaccatcagcagcctagagcctgaagattttgcagtttattactgtcagcagcgtagcaactggcctccgcggctcactttcggcggagggaccacggtggagatcaaac

SEQ ID NO: 11483 - DNA, 335 bp, Homo sapiens
gatattgtgatgactcagtctccactctccctgcccgtcacccctggagagccggcctccatctcctgcaggtctagtcagagcctcctgaatagtaatggatacaactatttggattggtacctgcagaagccagggcagtctccacagctcctgatctattcgggttctactcgggcctccggggtccctgacaggttcagtggcagtggatcaggcacagattttacactgaaaatcagcagagtggaggctgaggatgttggggtttattactgcatgcaagctctacaaactcctcagacgttcggccaagggaccaaggtggaaatcaa

SEQ ID NO: 11484 - DNA, 325 bp, Homo sapiens
tcctatgagctgacacagccaccctcggtgtcagtgtccccaggacagacggccaggatcacctgctctggagatgcattgccaaaacaatatgcttattggtaccagcagaagccaggccaggcccctgtcttggtgatatctaaagacagtgagaggccctcagggatccctgagcgattctctggctccagctcagggacaacagtcacgttgaccatcagtggagtccaggcagaagatgaggctgactattactgtcaatctgcagacagcacaactacttatcgggtcttcggaactgggaccaaggtcaccgtcctag

SEQ ID NO: 11485 - DNA, 319 bp, Homo sapiens; identical to SEQ ID NO: 5324

SEQ ID NO: 11486 - DNA, 331 bp, Homo sapiens; identical to SEQ ID NO: 9232

SEQ ID NO: 11487 - DNA, 331 bp, Homo sapiens
cagtctgtgctgactcagccaccctcagcctctgggacccccgggcagagggtcaccatctcttgtgctggaagcagctccaacatcggaagtaatactgtaaattggtaccagcagctcccaggaacggcccccaaactcctcatctatagtaatgatcagcggccctcaggggtccctgaccgattctctggctccaagtctggcacctcagcctccctggccatcagtgggctccagtctgaggatgaggctgattattactgtgcaacatgggatgacagcctgaatggttgggtgttcggcggagggaccaagctgaccgtcctag

SEQ ID NO: 11488 - DNA, 331 bp, Homo sapiens
cagactgtggtgacccaggagccatcattctcagtgtcccttggagggacagtcacactcacttgtggcttgaactctggctcagtctctactacttactacgccagttggtaccagcagaacccaggccaggctccacgcacgctcatatacaacacaaacactcgctcttctggggtccctgatcgcttctctggctccatccttgggaacaaagctgccctcaccatcacgggggcccaggcagatgatgaatctgattattattgtgtgttgtatatgggtagtggcatttgggtgttcggcggagggaccaagctgaccgtcctag

SEQ ID NO: 11489 - DNA, 319 bp, Homo sapiens
gaaatagtgatgacgcagtctccagccaccctgtctgtgtctccaggggaaagagccaccctctcctgcagggccagtcagagtgttagcagcaacttagcctggtaccagcagaaacctggccaggctcccaggctcctcatctatggtgcatccaccagggccactggtatcccagccaggttcagtggcagtgggtctgggacagagttcactctcaccatcagcagcctgcagtctgaagattttgcagtttattactgtcagcagtataatatcggggcgacgttcggccaagggaccaaggtggaaatcaaac

SEQ ID NO: 11490 - DNA, 325 bp, Homo sapiens
gacatccagatgacccagtctccatcctccctgtctgcatctgtaggagacagagtcaccatcacttgccgggcaagtcagagcattagcagctatttaaattggtatcagcagaaaccagggaaagcccctaagctcctgatctatgctgcatccagtttgcaaagtggggtcccatcaaggttcagtggcagtggatctgggacagatttcactctcaccatcagcagtctgcaacctgaagattttgcaacttactactgtcaacagagttacagtaccccccggtacacttttggccaggggaccaagctggagatcaaac

SEQ ID NO: 11491 - DNA, 325 bp, Homo sapiens
tcctatgagctgactcagccactctcagtgtcagtggccctgggacagacggccaggattacctgtgggggaaacaacattggaagtaaaaatgtgcactggtaccagcagaagccaggccaggcccctgtgctggtcatctatagggatagcaaccggccctctgggatccctgagcgattctctggctccaactcggggaacacggccaccctgaccatcagcagagcccaagccggggatgaggctgactattactgtcaggtgtgggacagcagcactgagggttatgtcttcggaactgggaccaaggtcaccgtcctag

SEQ ID NO: 11492 - DNA, 322 bp, Homo sapiens
gacatccagatgacccagtctccatcctccctgtctgcatctgtaggagacagagtcaccatcacttgccgggcaagtcagagcattagcagctatttaaattggtatcagcagaaaccagggaaagcccctaagctcctgatctatgctgcatccagtttgcaaagtggggtcccatcaaggttcagtggcagtggatctgggacagatttcactctcaccatcagcagtctgcaacctgaagattttgcaacttactactgtcaacagagttacagtacccctcagactttcggccctgggaccaaagtggatatcaaac

SEQ ID NO: 11493 - DNA, 346 bp, Homo sapiens
caggctgtgctgactcagccgtcctccctctctgcttctcctggagcatcagccagtctcacctgcaccttgcgcagtgacatcattgttggtacttacaggatatactggtaccagcagaagtcagggagtcctccccagtatctcctgaggtacaaatcagactcagataaacatcagggctctggagtccccagccgcttctctggatccaaagatgcttcggccaatgcagggattttactcatctctgggctccagtctgacgatgaggctgactattactgtatgacttggcacaacagcgcttgggtgttcggcggagggaccaagctgaccgtcctag

SEQ ID NO: 11494 - DNA, 322 bp, Homo sapiens; identical to SEQ ID NO: 837

SEQ ID NO: 11495 - DNA, 322 bp, Homo sapiens; identical to SEQ ID NO: 2360

SEQ ID NO: 11496 - DNA, 319 bp, Homo sapiens
gacatccagatgacccagtctccatcctccctgtctgcttctgtaggagacagagtcaccatcacttgccgggcaagtcagaccattaacaactatttaaattggtatcagcagagaccagggaaagcccctgaactcctgatctctgctgcatccattttgcaaattggggtcccatcaaggttcagtggcagtggatttgggacagatttcactctcaccatcagcagtctgcaacctgaagattttggaacttactactgtcaacagagttatcggacccctcacttcggccaagggacacggctggagattaaac

SEQ ID NO: 11497 - DNA, 322 bp, Homo sapiens; identical to SEQ ID NO: 7599

SEQ ID NO: 11498 - DNA, 328 bp, Homo sapiens
gaaattgtgttgacacagtctccagccaccctgtctttgtctccaggggaaagagccaccctctcctgcagggccagtcagagtgttagcaacttcttagcctggtaccaacagaaacctggccaggctcccaggctcctcatctatgatgcatccaacagggccactggcatcccagccaggttcagtggcagtgggtctgggacagacttcactctcaccatcagcagcctagagcctgaagattttgcagtttattattgtcagcagcgtagcaactggcctccgaggctcactttcggcggagggaccaaggtggagatcaaac

SEQ ID NO: 11499 - DNA, 337 bp, Homo sapiens
cagtctgccctgactcagcctgcctccgtgtctgggtctcctggacagtcgatcaccatctcctgcactggaaccagcagtgacgttggtggttataactatgtctcctggtaccaacagcacccaggcaaagcccccaaactcatgatttatgaggtcagtaatcggccctcaggggtttctaatcgcttctctggctccaagtctggcaacacggcctccctgaccatctctgggctccaggctgaggacgaggctgattattactgcagctcatatacaagcagcagcactctcccgccggtgttcggcggagggaccaagctgaccgtcctag

SEQ ID NO: 11500 - DNA, 331 bp, Homo sapiens; identical to SEQ ID NO: 4050

SEQ ID NO: 11501 - DNA, 331 bp, Homo sapiens
cagtctgccctgactcagcctgcctccgtgtctgggtctcctggacagtcgatcaccatctcctgcactggaaccagcagtgatgttgggagttttaaccttgtctcctggtaccaacagcacccaggcaaagcccccaaactcatgatttatgaggtcagtaagcggccctcaggggtttctaatcgcttctctggctccaagtctggcaacacggcctccctgacaatctctgggctccaggctgaggacgaggctgattattactgctgctcatatgcaggtagtagcgcttgggtattcggcggagggaccaagctgaccgtcctag

SEQ ID NO: 11502 - DNA, 322 bp, Homo sapiens; identical to SEQ ID NO: 3949

SEQ ID NO: 11503 - DNA, 322 bp, Homo sapiens; identical to SEQ ID NO: 9378

SEQ ID NO: 11504 - DNA, 322 bp, Homo sapiens
gccatccggatgacccagtctccatcctcattctctgcatctacaggagacagagtcaccatcacttgtcgggcgagtcagggtattagcagttatttagcctggtatcagcaaaaaccagggaaagcccctaagctcctgatctatgctgcatccactttgcaaagtggggtcccatcaaggttcagcggcagtggatctgggacagatttcactctcaccatcagctgcctgcagtctgaagattttgcaacttattactgtcaacaatattatagttacccgtggacgttcggccaagggaccaaggtggaaatcaaac

SEQ ID NO: 11505 - DNA, 328 bp, Homo sapiens
gaaattgtgttgacacagtctccagccaccctgtctttgtctccaggggaaagagccaccctctcctgcagggccagtcagagtgttagcagctacttagcctggtaccaacagaaacctggccaggctcccaggctcctcatctatgatgcatccaacagggccactggcatcccagccaggttcagtggcagtgggtctgggacagacttcactctcaccatcagcagcctagagcctgaagattttgcagtttattactgtcagcagcgtagcaactggcctccgcgattcactttcggccctgggaccaaagtggatatcaaac

SEQ ID NO: 11506 - DNA, 322 bp, Homo sapiens
gacatccagatgacccagtctccatcctccctgtctgcatctgtaggagacagagtcaccatcacttgccgggcaagtcagagcattagcagctatttaaattggtatcagcagaaaccagggaaagcccctaagctcctgatctatgctgcatccagtttgcaaagtggggtcccatcaaggttcagtggcagtggatctgggacagatttcactctcaccatcagcagtctgcaacctgaagattttgcaacttactactgtcaacagagttacagtacccggtggacgttcggccaagggaccaaggtggaaatcaaac

SEQ ID NO: 11507 - DNA, 331 bp, Homo sapiens
cagtctgccctgactcagcctgcctccgtgtctgggtctcctggacagtcgatcaccatctcctgcactggaaccagcagtgacgttggtggttataactatgtctcctggtaccaacaccacccaggcaaagcccccaaactcatgatttatgaggtcagtaatcggccctcaggggtttctaatcgcttctctggctccaagtctggcaacacggcctccctgaccatctctgggctccaggctgaggacgaggctgattattactgcagctcatatacaagcagcagcactctcgggttcggcggagggaccaagctgaccgtcctag

SEQ ID NO: 11508 - DNA, 337 bp, Homo sapiens
cagtctgccctgactcagcctgcctccgtgtctgggtctcctggacagtcgatcaccatctcctgcactggaaccagcagtgacgttggtggttataactatgtctcctggtaccaacagcacccaggcaaagcccccaaactcatgatttatgaggtcagtaatcggccctcaggggtttctaatcgcttctctggctccaagtctggcaacacggcctccctgaccatctctgggctccaggctgaggacgaagctgattattactgcagctcatatacaagcagcagcactcttaattgggtgttcggcggagggaccaagctgaccgtcctag

SEQ ID NO: 11509 - DNA, 325 bp, Homo sapiens
gaaattgtgttgacgcagtctccaggcaccctgtctttgtctccaggggaaagagccaccctctcctgcagggccagtcagagtgttagcagcagctacttagcctggtaccagcagaaacctggccaggctcccaggctcttcatctatggtgcatccagcagggccactggcatcccagacaggttcagtggcagtgggtctgggacagacttcactctcaccatcagcagactggagcctgaagattttgcagtgtattactgtcagcagtatggtaactcaccgtggacgttcggccaagggaccaaggtggaaatcaaac

SEQ ID NO: 11510 - DNA, 322 bp, Homo sapiens; identical to SEQ ID NO: 837

SEQ ID NO: 11511 - DNA, 325 bp, Homo sapiens; identical to SEQ ID NO: 1686

SEQ ID NO: 11512 - DNA, 322 bp, Homo sapiens; identical to SEQ ID NO: 9405

SEQ ID NO: 11513 - DNA, 322 bp, Homo sapiens; identical to SEQ ID NO: 3934

SEQ ID NO: 11514 - DNA, 325 bp, Homo sapiens
gaaattgtgttgacacagtctccagccaccctgtctttgtctccaggggaaagagccaccctctcctgcagggccagtcagagtgttagcagctacttagcctggtaccaacagaaacctggccaggctcccaggctcctcatctatgatgcatccaacagggccactggcatcccagccaggttcagtggcagtgggtctgggacagacttcactctcaccatcagcagcctagagcctgaagattttgcagtttattactgtcagcagcgtagcaactggctcccgcccagttttggccaggggaccaagctggagatcaaac

SEQ ID NO: 11515 - DNA, 322 bp, Homo sapiens
gacatccagatgacccagtctccatcctccctgtctgcatctgtaggagacagagtcaccatcacttgccaggcgagtcaggacattagcaactatttaaattggtatcagcagaaaccagggaaagcccctaagctcctgatctacgatgcatccaatttggaaacaggggtcccatcaaggttcagtggaagtggatctgggacagattttactttcaccatcagcagcctgcagcctgaagatattgcaacatattactgtcaacagtatgataatctccagctcactttcggcggagggaccaaggtggagatcaaac

SEQ ID NO: 11516 - DNA, 334 bp, Homo sapiens
cagtctgtgctgactcagccaccctcagcgtctgggacccccgggcagagggtcaccatctcttgttctggaagcagctccaacatcggaagtaatactgtaaactggtaccagcagctcccaggaacggcccccaaactcctcatctatagtaataatcagcggccctcaggggtccctgaccgattctctggctccaagtctggcacctcagcctccctggccatcagtgggctccagtctgaggatgaggctgattattactgtgcagcatgggatgacagcctgaatggtcggtgggtgttcggcggagggaccaagctgaccgtcctag

SEQ ID NO: 11517 - DNA, 319 bp, Homo sapiens
tcctatgagctgactcagccaccctcagtgtccgtgtccccaggacagacagccagcatcacctgctctggagataaattgggggataaatatgcttgctggtatcagcagaagccaggccagtcccctgtgctggtcatctatcaagatagcaagcggccctcagggatccctgagcgattctctggctccaactctgggaacacagccactctgaccatcagcgggacccaggctatggatgaggctgactattactgtcaggcgtgggacagcagctctggagtgttcggcggagggaccaagctgaccgtcctag

SEQ ID NO: 11518 - DNA, 325 bp, Homo sapiens
gaaatagagatgacgcagtctccagccaccctgtctgtgtctccaggggaaagagccaccctctcctgcagggccagtcagagtgttagcagcaacttagcctggtaccagcagaaacctggccaggctcccaggctcctcatctatggtgcatccaccagggccactggtatcccagccaggttcagtggcagtgggtctgggacagagttcactctcaccatcagcagcctgcagtctgaagattttgcagtttattactgtcagcagtataataactggcctccgtggacgttcggccaagggaccaaggtggaaatcaaac

SEQ ID NO: 11519 - DNA, 334 bp, Homo sapiens
caggttgtgctgactcaatcgccctctgtctctgcctccctgggagcctcggtcaaactcacctgcactctgagcagtggacacaccagcaacaccatcgcatggcatcagcagcagccagagaagggccctcggtttttgatgagggttaacagtgatggcggccacaacaagggggacggcatccctgatcgcttctcagcctccagctctggggctgagcgcttcctcgtcatctccagcctccagtctgaggatgaggctgtctattactgtcagacgtggggcactggcattcacgtgttcggcggagggaccaagctgaccgtcctag

SEQ ID NO: 11520 - DNA, 325 bp, Homo sapiens; identical to SEQ ID NO: 1686

SEQ ID NO: 11521 - DNA, 322 bp, Homo sapiens; identical to SEQ ID NO: 837

SEQ ID NO: 11522 - DNA, 322 bp, Homo sapiens
gacatccagatgacccagtctccatcctccctgtctgcatctgtaggagacagagtcaccatcacttgccgggcgagtcagggcattagcaattctttagcctggtatcagcagaaaccagggaaagcccctaagctcctgctctatgctgcatccagattggaaagtggggtcccatccaggttcagtggcagtggatctgggacggattacactctcaccatcagcagcctgcagcctgaagattttgcaacttattactgtcaacagtattatagtaccccctacacttttggccaggggaccaagctggagatcaaac

SEQ ID NO: 11523 - DNA, 325 bp, Homo sapiens
tcctatgacctgacacagccaccctcggtgtcagtgtccccaggacagacggccaggatcacctgctctggagatgcattgccaaaacaatatacttattggtaccagcagaagccaggccaggcccctctactggtgatatatagagacagtgagaggccctcagggatccctgagcgattctctggctccagctcagggacagcagtcacgttgaccatcagtggagtccaggcagaagacgaggctgactattactgtcaatcagcagacagcagtggtacttattgggtgttcggcggagggaccaagctgaccgtcctag

SEQ ID NO: 11524 - DNA, 325 bp, Homo sapiens; identical to SEQ ID NO: 8464

SEQ ID NO: 11525 - DNA, 328 bp, Homo sapiens
gaaattgtgttgacgcagtctccaggcaccctgtctttgtctccaggggaaagagccaccctctcctgcagggccagtcagagtgttagcagcagctacttagcctggtaccagcagaaacctggccaggctcccaggctcctcatctatggtgcatccagcagggccactggcatcccagacaggttcagtggcagtgggtctgggacagacttcactctcaccatcagcagactggagcctgaagattttgcagtgtattactgtcagcagtatggtagctcactcttgtacagttttggccaggggaccaagctggagatcaaac

SEQ ID NO: 11526 - DNA, 322 bp, Homo sapiens; identical to SEQ ID NO: 837

SEQ ID NO: 11527 - DNA, 328 bp, Homo sapiens
gaaatagtgatgacgcagtctccagccaccctgtctgtgtctccaggggaaagagccaccctctcctgcagggccagtcagagtgttagcagcaacttagcctggtaccagcagaaacctggccaggctcccaggctcctcatctatggtgcatccaccagggccactggtatcccagccaggttcagtggcagtgggtctgggacagagttcactctcaccatcagcagcctgcagtctgaagattttgcagtttattactgtcagcagtataataactggcctcctatgtacacttttggccaggggaccaagctggagatcaaac

SEQ ID NO: 11528 - DNA, 322 bp, Homo sapiens; identical to SEQ ID NO: 5205

SEQ ID NO: 11529 - DNA, 322 bp, Homo sapiens; identical to SEQ ID NO: 3870

SEQ ID NO: 11530 - DNA, 328 bp, Homo sapiens
gaaattgtgttgacgcagtctccaggcaccttgtctttgtctccaggggaaagagccaccctctcctgcagggccagtcagagtgttagcagcagccgcttagcctggtaccagcaaaaacctggccaggctcccaggctcctcatctatggtacatccagcagggccaccggcatcccagacaagttcagtggcagtgggtctgggacagacttcactctcactatcactagactggagcctgaagattttgcagtgtattactgtcagcagtatggtagttcacctctgtacacttttggccaggggaccaagctggagatcaaac

SEQ ID NO: 11531 - DNA, 325 bp, Homo sapiens
tcctctgaggtgacacagccaccctcgatgtcagtgtccccaggacagacggccaggatcacctgctctggagatgcattgccaaagcaatatgcttattggtaccagcagaagccaggccaggcccctgtgttggtgatacataaagacagtgagaggccctcagggatccctgagcgattctctggctccagctcagggacaacagtcacgttgaccatcagagaagtccaggcagaagatgaggctgactattactgtcaatcagcagacaggagtggtacttatcgagtgttcggcggagggaccaagctgaccgtcctag

SEQ ID NO: 11532 - DNA, 322 bp, Homo sapiens; identical to SEQ ID NO: 3452

SEQ ID NO: 11533 - DNA, 322 bp, Homo sapiens; identical to SEQ ID NO: 929

SEQ ID NO: 11534 - DNA, 340 bp, Homo sapiens; identical to SEQ ID NO: 3951

SEQ ID NO: 11535 - DNA, 322 bp, Homo sapiens
gacatccagatgacccagtctccatcctcactgtctgcatctgtaggagacagagtcaccatcacttgtcgggcgagtcagggtattagcagctggttagcctggtatcagcagaaaccagagaaagcccctaagtccctgatctatgctgcatccagtttgcaaagtggggtcccatcaaggttcagcggcagtggatctgggacagatttcactctcaccatcagcagcctgcagcctgaagattttgcaacttattactgccaacagtataatagttaccctcggacgttcggccaagggaccaaggtggaaatcaaac

SEQ ID NO: 11536 - DNA, 331 bp, Homo sapiens
cagtctgtgctgactcagccaccctcagcgtctgggacccccgggcagagggtcaccatctcttgttctggaagcagctccaacatcggatataattatgtatactggtaccagcagctcccaggaacggcccccaaacgcctcatctatagtaataatcaggggccctcaggggtccctgaccgattctctggctccaagtctggcacctcagcctccctggccatcagtgggctccggtccgaggatgaggctgattattactgtgcagcatgggatgacagcctgagtggttgggtgttcggcggagggaccaagctgaccgtcctag

SEQ ID NO: 11537 - DNA, 322 bp, Homo sapiens
gacatccagatgacccagtctccatcctccctgtctgcatctgtaggagacagagtcaccataacttgccgggcaagtcagaacattattactcatttaaattggtatcagcagaaaccagggaaagcccctaggctcctgatctatgctgcatccagtttgcaaagtggggtcccatcaaggttcagtggcagtggatctgggacagatttcactctcaccatcagcagtctgcaacctgaagattttgcaacttactactgtcaacagagttacactaccccgtggacgttcggccaagggaccaaggtggaaatcaaac

SEQ ID NO: 11538 - DNA, 325 bp, Homo sapiens
gaaattgtgttgacgcagtctccaggcaccctgtctttgtctccaggggaaagagccaccctctcctgcagggccagtcagagtgttagcagcagctacttagcctggtaccagcagaaacctggccaggctcccaggctcctcatctatggtgcatccagcagggccactggcatcccagacaggttcagtggcagtgggtctgggacagacttcactctcaccatcagcagactggagcctgaagattttgcagtgtattactgtcagcagtatggtagctcacctttcactttcggccctgggaccaaagtggatatcaaac

SEQ ID NO: 11539 - DNA, 322 bp, Homo sapiens; identical to SEQ ID NO: 11320

SEQ ID NO: 11540 - DNA, 331 bp, Homo sapiens
cagtctgtgctgactcagccaccctcggtgtctgaagcccccaggcagagggtcaccatctcctgttctggaagcagctccaacatcggaaataatgctgtaaactggtaccagcaggtcccaggaaaggctcccaaactcctcatctactatgatgatattctgccctcaggggtctctgaccgattctctggctccaagtctggcacctcagcctccctggccatcagtgggctccagtctgaggatgaggctgattattcctgttcaacatgggatgacagtctgaatggttgggtgttcggcggtgggaccaagctgaccgtcctag

SEQ ID NO: 11541 - DNA, 322 bp, Homo sapiens; identical to SEQ ID NO: 837

SEQ ID NO: 11542 - DNA, 328 bp, Homo sapiens
gaaatagtgatgacgcagtctccagccaccctgtctgtgtctccaggggaaagagccaccctctcctgcagggccagtcagagtgttagcagcaacttagcctggtaccagcagaaacctggccaggctcccaggctcctcatctatggtgcatccaccagggccactggtatcccagccaggttcagtggcagtgggtctgggacagagttcactctcaccatcagcagcctgcagtctgaagattttgcagtttattactgtcagcagtataataactggcctcggatgtacacttttggccaggggaccaagctggagatcaaac

SEQ ID NO: 11543 - DNA, 337 bp, Homo sapiens
gatattgtgatgactcagtctccactctccctgcccgtcacccctggagagccggcctccatctcctgcaggtctagtcagagcctcctgcatagtaatggatacaactatttggattggtacctgcagaagccagggcagtctccacagctcctgatctatttgggttctaatcgggcctccggggtccctgacaggttcagtggcagtggatcaggcacagattttacactgaaaatcagcagagtggaggctgaggatgttggggtttattactgcatgcaagctctacaaaccgcgctcactttcggcggagggaccaaggtggagatcaaac

SEQ ID NO: 11544 - DNA, 331 bp, Homo sapiens
cagtctgccctgactcagcctgcctccgtgtctgggtctcctggacagtcgatcaccatctcctgcactggaaccagcagtgatgttgggagttataaccttgtctcctggtaccaacagcacccaggcaaagcccccaaactcatgatttatgaggtcactaagcggccctcaggggtttctaatcgcttctctggctccaagtctggcaacacggcctccctgacaatctctgggctccaggctgaggacgaggctgattattactgcagctcatatacaagcagcagcacttgggtgttcggcggagggaccaagctgaccgtcctag

SEQ ID NO: 11545 - DNA, 334 bp, Homo sapiens
cagtctgtgctgacgcagccgccctcagtgtctggggccccagggcagagggtcaccatctcctgcactgggagcagctccaacatcggggcagcttatggtgtacactggtaccagcaacttccaggaaaagcccccaaactcctcatctatggtaacagcaatcggccctcaggggtccctgaccgattctctggctccaagtctggcacctcagcctccctggccatcactgggctccaggctgaggatgaggctgattattactgccagtcctatgacagcagcctgagtggttatgtcttcggaactgggaccaaggtcaccgtcctag

SEQ ID NO: 11546 - DNA, 340 bp, Homo sapiens
gacatcgtgatgacccagtctccagactccctggctgtgtctctgggcgagagggccaccatcaactgcaagtccagccagagtgtttcatacagcttcaacaataagaactacgtagcttggtaccgccagaaaccagggcagcctcctaagttgctcatttactgggcatctacccggaattccggggtccctgaccgattcagtggcagcgggtctgggacaaatttcactctcaccatcagcagcctgcaggctgaggatgtggcactttatatctgtcagcaatatcataatactccttggacgttcggccaagggaccaaggtggaaatcaaac

SEQ ID NO: 11547 - DNA, 322 bp, Homo sapiens; identical to SEQ ID NO: 851

SEQ ID NO: 11548 - DNA, 331 bp, Homo sapiens; identical to SEQ ID NO: 10560

SEQ ID NO: 11549 - DNA, 325 bp, Homo sapiens
tcctatgagctgacacagccaccctcggtgtcagtgtccccaggacagacggccaggatcacctgctctggagatgcattgccaaagcaatatgcttattggtaccagcagaagccaggccaggcccctgtggtggtgatatataaagacagtgagaggccctcagggatccctgagcgattctctggctccagctcagggacaacagtcacgttgaccatcagtggagtccagacagaagacgaggctgactattactgtcaatcagcagacagcagtggtgcccttggggtgttcggcggagggaccaagctgaccgtcctag

SEQ ID NO: 11550 - DNA, 322 bp, Homo sapiens; identical to SEQ ID NO: 851

SEQ ID NO: 11551 - DNA, 331 bp, Homo sapiens
cagtctgtgttgacgcagccgccctcagtgtctgcggccccaggacagaaggtcaccatctcctgctctggaagcaactccaatattgggaataattatgtatcctggtaccagcaactcccaggaacagcccccaaactcctcatctatgaaagtaataagcgaccctcagggattcctgaccgattctctggctccaagtctggcacgtcagccaccctgggcatcaccggactccagactggggacgaggccgattattactgcggaacatgggatagtagcctgagtgacggggtgttcggcggagggaccaagctgaccgtcctag

SEQ ID NO: 11552 - DNA, 322 bp, Homo sapiens
gacatccagatgacccagtctccatcctccctgtctgcatctgtaggagacagagtcaccatcacttgccgggcaagtcagagcattagcagctatttaaattggtatcagcagaaaccagggaaagcccctaagctcctgatctatgctgcatccagtttgcaaagtggggtcccatcaaggttcagtggcagtggatctgggacagatttcactctcaccatcagcagtctgcaacctgaagattttgcaacttactactgtcaacagagttacagtaccatgtacacttttggccaggggaccaagctggagatcaaac

SEQ ID NO: 11553 - DNA, 325 bp, Homo sapiens
gaaattgtgttgacgcagtctccaggcaccctgtctttgtctccaggggaaagagccaccctctcctgcagggccagtcagagtgttagaagcagctacttagcctggtaccagcagaaacctggccaggctcccaggctcctcatttatggtgcatccagcagggccactggcatcccagacaggttcagtggcagtgggtctgggacagacttcactctcaccatcagcagactggagcctgaagattttgcagtgtattactgtcagcaccatggtagttcattaatcactttcggccctgggaccaaagtggatatcaaac

SEQ ID NO: 11554 - DNA, 337 bp, Homo sapiens
gacatcgtgatgacccagtctccagactccctggctgtgtctctgggcgagagggccaccatcaactgcaagtccagccagagtgttttatacagctccaacaataagaactacttagcttggtaccagcagaaaccaggacagcctcctaagctgctcatttactgggcatctacccgggaatccggggtccctgaccgattcagtggcagcgggtctgggacagatttcactctcaccatcagcagcctgcaggctgaagatgtggcagtttattactgtcagcaatattatagtactctgacgttcggccaagggaccaaggtggaaatcaaac

SEQ ID NO: 11555 - DNA, 334 bp, Homo sapiens
gatattgtgatgactcagtctccactctccctgcccgtcacccctggagagccggcctccatctcctgcaggtctagtcagagcctcctgcatagtaatggatacaactatttggattggtacctgcagaagccagggcagtctccacagctcctgatctatttgggttctaatcgggcctccggggtccctgacaggttcagtggcagtggatcaggcacagattttacactgaaaatcagcagagtggaggctgaggatgttggggtttattactgcatgcaagctctacaaactcctcatttcggcggagggaccaaggtggagatcaaac

SEQ ID NO: 11556 - DNA, 322 bp, Homo sapiens
gaaattgtgttgacgcagtctccaggcaccctgtctttgtctccaggggaaagagccaccctctcctgcagggccagtcagagtgttagcagcagctacttagcctggtaccagcagaaacctggccaggctcccaggctcctcatctatggtgcatccaccagggccactggtatcccagccaggttcagtggcagtgggtctgggacagagttcactctcaccattagcagcctacagtctgaagattttgcagtttattactgtcagcagtataatgcctggcggagttttggccaggggaccaagctggagatcaaac

SEQ ID NO: 11557 - DNA, 325 bp, Homo sapiens
gaaattgtgttgacgcagtctccaggcaccctgtctttgtctccaggggaaagagccaccctctcctgcagggccagtcagagtgttagcagcagctacttagcctggtaccagcagaaacctggccaggctcccaggctcctcatctatggtgcatccagcagggccactggcatcccagacaggttcagtggcagtgggtctgggacagacttcactctcaccatcagcagactggagcctgaagattttgcagtgtattactgtcagcagtatggtagctcactgtggacgttcggccaagggaccaaggtggaaatcaaac

SEQ ID NO: 11558 - DNA, 325 bp, Homo sapiens
gaaattgtgttgacgcagtctccaggcaccctgtctttgtctccaggggaaagagccaccctctcctgcagggccagtcagagtgttagcagcagctacttagcctggtaccagcagaaacctggccaggctcccaggctcctcatctatggtgcatccagcagggccactggcatcccagacaggttcagtggcagtgggtctgggacagacttcactctcaccatcagcagactggagcctgaagattttgcagtgtattactgtcagcagtatggtagctcactttacacttttggccaggggaccaagctggagatcaaac

SEQ ID NO: 11559 - DNA, 322 bp, Homo sapiens; identical to SEQ ID NO: 837

SEQ ID NO: 11560 - DNA, 328 bp, Homo sapiens
caggctgtggtgactcaggagccctcactgattgtgtccccaggggggacagtccttctcacctgtggctccagcactggagctgtcacccctggtcttcatccctactggttccaacagaagcccggccaggcccccaggacactgatttatgataccagtgttaaaagttcatggacacctgcccggttctcaggctccctccttgggggcaaagctgccctgaccctttcgggtgcgcagcctgaagatgaggctgactattactgcctcctatattacaataatggtcgggtgttcggcggagggaccaagctgaccgtcctag

SEQ ID NO: 11561 - DNA, 322 bp, Homo sapiens
gaaatagtgatgacgcagtctccagccaccctgtctgtgtctccaggggaaagagccaccctctcctgcagggccagtcagagtgttagcagcaacttagcctggtaccaacagaaacctggccaggctcccaaggtcctcgtctatggtgcgtccaccagggccactggtgtcccagccaggttcagtggcagtgggtctcggacagacttcactctcaccatcagcagcctgcagtctgaggattttgcagtttactactgtcagcagtataatgactggcctcgaacgttcggccatgggaccagggtggaaatcaaac

SEQ ID NO: 11562 - DNA, 322 bp, Homo sapiens
gaaatagtcgtgacacagtctccagtcaccctgtcactgtctccaggggaaagagccaccctgtcttgcaggaccagtcagaatgttagaagttacttagcctggtatcaacagaaacctggccaggctcccaggctcctcatctatgatgcttcctccagggccactggcgtcccagccaggttcagtggcagtgggtctgggacagacttcactctcaccatatccagcctagagcctgaagattctgcagtttactactgtcaccagcgtgacgcatggccggggacgtccggccgagggaccagggtggagctcaaac

SEQ ID NO: 11563 - DNA, 337 bp, Homo sapiens
gatattgtgatgactcagtctccactctccctgcccgtcacccctggagagccggcctccatctcctgcaggtctagtcagagcctcctgcatagtaatgggaacaactatttgcattggtacctgcagaagccagggcagtctccacagctcctgatctatttgggttctaatcgggcctccggggtccctgacaggttcagtggcagtggatcaggcacagattttacactgaaaatcagcagagtggaggctgaggatgttggggcctattactgcatgcaagctctacagattccgtacgtttttggccaggggaccaagctagagatcaaac

SEQ ID NO: 11564 - DNA, 322 bp, Homo sapiens; identical to SEQ ID NO: 927

SEQ ID NO: 11565 - DNA, 322 bp, Homo sapiens
gagattgtgctgactcagtctccagactttcagtctgtgactccaaaggagaaagtcaccatcacctgccgggccagtcagagcattggtagtagcttacactggtaccagcagaaaccagatcagtctccaaagctcctcatcaagtatgcttcccagtccttctcaggggtccccccgaggttcagtggcagtggatctgggacagatttcaccctcaccatcaatagcctggaagctgaagatgctgcaacgtattactgtcatcagagtagtagtttacctcgcactttcggcggagggaccaaggtggagatcaaac

SEQ ID NO: 11566 - DNA, 325 bp, Homo sapiens
tcctatgagctgacacagccaccctcggtgtcagtgtccccaggacagacggccaggatcacctgctctggagatgcattgccaaagcaatatgcttattggtaccagcagaagccaggccaggcccctgtgttggtgatatataaagacactgagaggccctcagggatccctgagcgattctctggctccagctcagggacaacagtcacgttgaccatcagtggagcccaggcagaagatgaggctgactattactgtcaatctgcagacagcacaactacttatcgggtcttcggaactgggaccaaggtcaccgtcctag

SEQ ID NO: 11567 - DNA, 322 bp, Homo sapiens
gacatccagatgacccagtctccatcctcactgtctgcatctgtaggagacagagtcaccatcacttgtcgggcgagtcagggcattagcaattatttagcctggtttcagcagaaaccagggaaagcccctaagtccctgatctatgctgcatccagtttgcaaagtggggtcccatcaaagttcagcggcagtggatctgggacagatttcactctcaccatcagcagcctgcagcctgaagattttgcaacttattactgccaacagtataatagttaccctttcactttcggccctgggaccaaagtggatatcaaac

SEQ ID NO: 11568 - DNA, 325 bp, Homo sapiens
gaaattgtgttgacacagtctccagccaccctgtctttgtctccaggggaaagagccaccctctcctgcagggccagtcagagtgttagcagctacttagcctggtaccaacagaaacctggccaggctcccaggctcctcatctatgatgcatccaacagggccactggcatcccagccaggttcagtggcagtgggtctgggacagacttcactctcaccatcagcagcctagagcctgaagattttgcagtttattactgtcagcagcgtagcaactggccttcgtacagttttggccaggggaccaagctggagatcaaac

SEQ ID NO: 11569 - DNA, 322 bp, Homo sapiens
tcctatgagctgacacagccaccctcggtgtcagtgtccccaggacagacggccaggatcacctgctctggagatgcattgccaaagcaatatgcttattggtaccagcagaagccaggccaggcccctgtgctggtgatatataaagacagtgagaggccctcagggatccctgagcgattctctggctccagctcagggacaacagtcacgttgaccatcagtggagtccaggcagaagacgaggctgactattactgtcaatcagcagacagcagggccactcgggtcttcggaactgggaccaaggtcaccgtcctag

SEQ ID NO: 11570 - DNA, 325 bp, Homo sapiens; identical to SEQ ID NO: 8429

SEQ ID NO: 11571 - DNA, 322 bp, Homo sapiens
gtcatctggatgacccagtctccatccttactctctgcatctacaggagacagagtcaccatcagttgtcggatgagtcagggcattagcagttatttagcctggtatcagcaaaaaccagggaaagcccctgagctcctgatctatgctgcatccactttgcaaagtggggtcccatcaaggttcagtggcagtggatctgggacagatttcactctcaccatcagttgcctgcagtctgaagattttgcaacttattactgtcaacagtattatagtttcccgtacagttttggccaggggaccaagctggagatcaaac

SEQ ID NO: 11572 - DNA, 335 bp, Homo sapiens
cagtctgtgctgacgcagccgccctcagtgtctggggccccagggcagagggtcaccatctcctgcactgggagcagctccaacatcggggcagattatgatatacactggtacctccaacttccaggaacagcccccaaactcctcatctatggtaacaacaatcggccctcaggggtccctgaccgattctctggctccaagtctggcacctcagcctccctggccatcactgggctccaggctgaggatgaggctgattattactgccagtcctatgacagcagcctgagtggtgcctgggtgttcggcggagggaccaagctgaccgtcct

SEQ ID NO: 11573 - DNA, 322 bp, Homo sapiens
gaaattgtgttgacgcagtctccaggcaccctgtctttgtctccaggggaaagagccaccctctcctgcagggccagtcagagtgttagcagcagctacttagcctggtaccagcagaaacctggccaggctcccaggctcctcatctatggtgcatccagcagggccactggcatcccagacaggttcagtggcagtgggtctgggacagacttcactctcaccatcagcagactggagcctgaagattttgcagtgtattactgtcagcagtatggtagctcacgggggtttggccaggggaccaagctggagatcaaac

SEQ ID NO: 11574 - DNA, 340 bp, Homo sapiens
cagtctgtgctgacgcagccgccctcagtgtctggggccccagggcagagggtcaccatctcctgcactgggagcagctccaacatcggggcaggttatgatgtacactggtaccagcagcttccaggaacagcccccaaactcctcatctatggtaacagcaatcggccctcaggggtccctgaccgattctctggctccaagtctggcacctcagcctccctggccatcactgggctccaggctgaggatgaggctgattattactgccagtcctatgacagcagcctgagtggttcgaattgggtgttcggcggagggaccaagctgaccgtcctag

SEQ ID NO: 11575 - DNA, 319 bp, Homo sapiens
gacatccagatgacccagtctccatcctccctgtctgcatctgtaggagacagagtcaccatcacttgccgggcaagtcagagcattagcagctatttaaattggtatcagcagaaaccagggaaagcccctaagctcctgatctatgctgcatccagtttgcaaagtggggtcccatcaaggttcagtggcagtggatctgggacagatttcactctcaccatcagcagtctgcaacctgaagattttgcaacttactactgtcaacagagttacagtaccctcactttcggccctgggaccaaagtggatatcaaac

SEQ ID NO: 11576 - DNA, 328 bp, Homo sapiens
cagactgtggtgactcaggagccctcactgactgtgtccccaggagggacagtcactctcacctgtgcttccagcactggagcagtcaccagtggttactatccaaactggttccagcagaaacctggacaagcacccagggcactgatttatagtacaagcaacaaacactcctggacccctgcccggttctcaggctccctccttgggggcaaagctgccctgacactgtcaggtgtgcagcctgaggacgaggctgagtattactgcctgctctactatggtggtgcttgggtgttcggcggagggaccaagctgaccgtcctag

SEQ ID NO: 11577 - DNA, 322 bp, Homo sapiens
gccatccggatgacccagtctccatcctcattctctgcatctacaggagacagagtcaccatcacttgtcgggcgagtcagggtattagcagttatttagcctggtatcagcaaaaaccagggaaagcccctaagctcctgatctatgctgcatccactttgcaaagtggggtcccatcaaggttcagcggcagtggatctgggacagatttcactctcaccatcagctgcctgcagtctgaagattttgcaacttattactgtcaacagtattatagttacccccgtgggttcggccaagggaccaaggtggaaatcaaac

SEQ ID NO: 11578 - DNA, 337 bp, Homo sapiens
gatattgtgatgactcagtctccactctccctgcccgtcacccctggagagccggcctccatctcctgcaggtctagtcagagcctcctgcgtagtaatggatacaactatttggattggtacctgcagaagccagggcagtctccacaactcctgatctatttgggttctaatcgggcctccggggtccctgacagattcagtggcagtggatcaggcacagattttacactgaaaatcagcagagtggaggctgaggatattggaatttattactgcatgcaagttctacaaactcttcacacttttggccaggggaccaagctggagatcaaac

SEQ ID NO: 11579 - DNA, 322 bp, Homo sapiens; identical to SEQ ID NO: 11320

SEQ ID NO: 11580 - DNA, 340 bp, Homo sapiens
gatattgtgatgactcagtctccactctccctgcccgtcacccctggagagccggcctccatctcctgcaggtctagtcagagcctcctgcatagtaatggatacaactatttggattggtacctgcagaagccagggcagtctccacagctcctgatctatttgggttctaatcgggcctccggggtccctgacaggttcagtggcagtggatcaggcacagattttacactgaaaatcagcagagtggaggctgaggatgttggggtttattactgcatgcaagctctacaaactcctccgaacacttttggccaggggaccaagctggagatcaaac

SEQ ID NO: 11581 - DNA, 338 bp, Homo sapiens
cagtctgccctgattcagcctccctccgtgtccgggtctcctggacagtcagtcaccatctcctgcactggaaccagcagtgatgttgggagttatgactatgtctcctggtaccaacagcacccaggcacagtccccaaacccatgatctacaatgtcaatactcagccctcaggggtccctgatcgtttctctggctccaagtctggcaatacggcctccatgaccatctctggactccaggctgaggacgaggctgattattagtgctgctcatatacaagcagtgccactccccgattgggtgttcggcggagggaccaagctgaccgtcctag

SEQ ID NO: 11582 - DNA, 322 bp, Homo sapiens
gaaattgtgctgactcagtctccagactttcagtctgtgactccaaaggagaaagtcaccatcacctgccgggccagtcagagcattggtagtagcttacactggtaccagcagaaaccagatcagtctccaaagctcctcatcaagtatgcttcccagtccttctcaggggtcccctcgaggttcagtggcagtggatctgggacagatttcaccctcaccatcaatagcctggaagctgaagatgctgcaacgtattactgtcatcagagtagtagtttaccgctcactttcggcggagggaccaaggtggagatcaaac

SEQ ID NO: 11583 - DNA, 322 bp, Homo sapiens
gacatccagatgacccagtctccatcctccctgtctgcatctgtaggagacagagtcaccatcacttgccaggcgagtcaggacattagcaactatttaaattggtatcagcagaaaccagggaaagcccctaagctcctgatctacgatgcatccaatttggaaacaggggtcccatcaaggttcagtggaagtggatctgggacagattttactttcaccatcagcagcctgcagcctgaagatattgcaacatattactgtcaacagtatgataatctctcgtacagttttggccaggggaccaagctggagatcaaac

SEQ ID NO: 11584 - DNA, 325 bp, Homo sapiens
gacatccagatgacccagtctcctcccaccctgtctgcatctgtaggagacagagtcaccatcacttgccgggccagtcagaatattaatagttggttggcctggtatcaacagaaaccaggaaaagcccctaaactcatgatctataaggcatctactttagaaagtggggtcccatcaaggttcagcggcagtgaatctgggacagaattcactctcaccatcagctgcctgcagccagatgattttgcaacttattactgtcaccaatacagtagttattcagtgtacagttttggccaggggaccaagttggagatcaaac

SEQ ID NO: 11585 - DNA, 322 bp, Homo sapiens; identical to SEQ ID NO: 10725

SEQ ID NO: 11586 - DNA, 319 bp, Homo sapiens; identical to SEQ ID NO: 1658

SEQ ID NO: 11587 - DNA, 328 bp, Homo sapiens
gaaattgtgttgacgcagtctccaggcaccttgtctttgtctccaggggaaagagccaccctctcctgcagggccagtcagagtgttagcagcagccgcttagcctggtaccagcagaaacctggccaggctcccaggctcctcatctatggtgcgtccagcagggccaccggcatcccagacaagttcagtggcagtgggtccgggacagacttcactctcactatcactagactggagcctgaagattttgcagtgtattactgtcagcagtatggtagttcacctctgtacacttttggccaggggaccaagctggagatcaaac

SEQ ID NO: 11588 - DNA, 328 bp, Homo sapiens
gaaattgtgttgacgcagtctccaggcaccctgtctttgtctccaggggaaagagccaccctctcctgcagggccagtcagagtgttagcagcagctacttagcctggtaccagcagaaacctggccaggctcccaggctcctcatctatggtgcatccagcagggccactggcatcccagacaggttcagtggcagtgggtctgggacagacttcactctcaccatcagcagactggagcctgaagattttgcagtgtattactgtcagcagtatggtagctcacctcggtggacttttggccaggggaccaagctggagatcaaac

SEQ ID NO: 11589 - DNA, 322 bp, Homo sapiens
tcctatgagctgactcagccaccctcagtgtccgtgtccccaggacagacagccagcatcacctgctctggagataaattgggggataaatatgcttgctggtatcagcagaagccaggccagtcccctgtgctggtcatctatcaagatagcaagcggccctcagggatccctgagcgattctctggctccaactctgggaacacagccactctgaccatcagcgggacccaggctatggatgaggctgactattactgtcaggcgtgggacagcagcactgggggggtcttcggaactgggaccaaggtcaccgtcctag

SEQ ID NO: 11590 - DNA, 326 bp, Homo sapiens
cagactgtggtgacccaggagccatcgttctcagtgtcccctggagggacagtcacactcacttgtggcttgaactctgactcagtctctacttctttttaccccacctggtaccagcagaccccaggccaggctccacgcacgctcatctataacacaaatattcgctcttctggggtccctgatcgcttctctggctccatccttgggaacaaagctgccctcaccatcacgggggcccaggcagatgatgaatctgattattactgtgtattatatatgaatggtggcatttgggtgttcggcggagggaccaaggtgaccgt

SEQ ID NO: 11591 - DNA, 322 bp, Homo sapiens; identical to SEQ ID NO: 11320

SEQ ID NO: 11592 - DNA, 337 bp, Homo sapiens
gatattgtgctgacccagactccactctcctcacctgtcacccttggacagccggcctccatctcctgcaggtctagtcaaagcctcgtacacagtgatggaaacacccacttgagttggcttcagcagaggccaggccagcctccaagactcctaatttataagatttctaaccggttctctggggtcccagacagattcagtggcagtggggcagggacagatttcacactgaaaatcagcagggtggaagctgaggatgtcggggtttattactgcatgcaagctacacaatttcctccgacgttcggccaagggaccaaggtggaaatcaaac

SEQ ID NO: 11593 - DNA, 322 bp, Homo sapiens; identical to SEQ ID NO: 4573

SEQ ID NO: 11594 - DNA, 338 bp, Homo sapiens
gacatcgtgatgacccagtctccagactccctggctgtgtctctgggcgagagggccaccatcaactgcaagtccagccagagtgttttatacagctccaacaataagaactacttagcttggtaccagcagaaaccaggacagcctcctaagctgctcatttactgggcatctacccggggatccggggtccctgaccgattcagtggcagcgggtctgggacagatttcactctcaccatcagcagcctgcaggctgaagatgtggcagtttattactgtcagcaatattatagtactcccttcactttcggccctgggaccaaagtggatatcaa

SEQ ID NO: 11595 - DNA, 355 bp, Homo sapiens
caggtgcagctgcaggagtcgggcccaggactggtgaagccttcggagaccctgtccctcacttgcactgtctctggtggcatcagtaactcttactggagttggatccggcaggccccagggacggggctggagtggattggctatatctatggcagtgggggtacccactacaatccctccctcaatagccgagccaccatatcaggagacgcgtccaagaatcagttatccctgaagctgagttctgtgaccgcagcggacacggccgtatattattgcgcgagacttcatgcctatcgttacgaagaatttgactgctggggccagggagccctagtcaccgtctcctcag

SEQ ID NO: 11596 - DNA, 358 bp, Homo sapiens
caggtgcagctgcaggagtcgggcccgggactggtgaagccttcggagaccctgtccctcacctgcactgtctctggtgcctccatcagtagtcactactggagctggatccggcagcccccagggaagggactggagtggattgggtatatctattacactgggagcaccagttacaatccctccctcaagagtcgagtcaccatcttagaagatccgtccaagaaccagttctccctgattctgaactctgtgaccgctgcggacacggccgtgtattattgtgccagactccatggctatcgttacgaagagtttgactcctggggccagggaaccctggtcaccgtctcctcag

SEQ ID NO: 11597 - DNA, 358 bp, Homo sapiens
caggtgcagctgcaggagtcgggcccaggactggtgaagccttcggagaccctgtccctcacctgcactgtctctggtggctccatcagtggttactactggagctggatccggcagcccccagggaagggactggagtggattgggtatatctattacattgggagcaccaggtacaatccctccctcaatagtcgagtcaccatattagtagacacgtctaagaaccagttctccctgaagctgagctctgtgaccgctgcggacacggccgtgtattactgtacgagactccatggctatcgttacgaagaatttgactcctggggccagggaaccctggtcaccgtctcctcag

SEQ ID NO: 11598 - DNA, 358 bp, Homo sapiens
caggtgcagctgcaggagtcgggcccaggactggtgaagccttcggagaccctgtccctcacctgcactgtctctggtggctccatcagtggttactactggagctggatccggcagcccccagggaagggactggagtggattgggtatatctattacagtgggagcaccaactacaatccctccctcaagagtcgagtcaccattttagtagacgcgtccaagaaccagttctccctgaagctgagctctgtgaccgctgcggacacggccgtgtattattgtgcgagactccatgcctatcgttacgaagaatttgactcctggggccagggatccctggtcaccgtctcctcag

SEQ ID NO: 11599 - DNA, 358 bp, Homo sapiens
caggtgcagctgcaggagtcgggcccaggactggtgaagccttcggagaccctgtccctcacctgcactgtctccggtgtctccatcagtaattactactggagctggatccggcagcccccagggaagggactggagtggattgcatatatctattacactgggaggaccaactacaatccctccctcaagagtcgagtcaccatattagaagacacgtccaagaaccagttctccctgaagctgagctctgtgaccgctgcggacacggccgtatattattgtgcgagactccatggctatcgttacgaagaatttgactactggggccagggaaccctggtcaccgtctcctcag

SEQ ID NO: 11600 - DNA, 244 bp, Homo sapiens; identical to SEQ ID NO: 9688

SEQ ID NO: 11601 - DNA, 244 bp, Homo sapiens
agctttggcatggaatcattcctccaagtccattaacaagggctggggcctgagcagccagtcggcccggcagcagaagccacgcatcccagttctgggtagtccggggagacccaaagcccaggccgggcctggcagccaccctcccagagcctccgctaggccagtcctgctgacgccgcatcggtgattcggaacagaatctgtccttctaaggtgtctccacagtcctgtcttcagcact

SEQ ID NO: 11602 - DNA, 244 bp, Homo sapiens
agctttggcatggaatcattcctccaagtccattaacaagggctggggcctgagcagccagtcggcccggcagcagaagccacgcatcccagctctgggtagtccggggagacccaaagcccaggccgggcctggcagccaccctcccagagcctccgctaggccagtcctgctgacgccgcatcggtgattcggaacagagtctgtccttctaaggtgtctccacagtcctgtcttcagcact

SEQ ID NO: 11603 - DNA, 244 bp, Homo sapiens; identical to SEQ ID NO: 9688

SEQ ID NO: 11604 - DNA, 366 bp, Homo sapiens
gaagtgcagctggtggagtctgggggaggcttggtacagcctggcaggtccgtgagaatttcctgtgcggcctctggattcacctttgataaatatgccatgcactgggtccggcaaggtccagggaagggcctggagtgggtctcaggtattacttggaatagtggtagcataggctatgcggactctgtgaagggccgattcaccatctccagagacaacgccaagaactccctgtatctgcaaatgatcagtctgagatctgaggacacggccctgtattactgtacaaaagaccgttacggtgactacggatggggtggtatggacgtctggggccaagggaccacggtcaccgtctcctca

SEQ ID NO: 11605 - DNA, 366 bp, Homo sapiens; identical to SEQ ID NO: 11604

SEQ ID NO: 11606 - DNA, 379 bp, Homo sapiens
caggtgcagctgcaggagtcgggcccaggactggtgaagccttcggagaccctgtccctcacctgcactgtctctggtggctccgtcagcagtggtagtgactactggaattggatccggcagcccccagggaagggactggagtggattgggtatgtctattacagtgggagcaccaactacaacccctccctcaagagtcgagtcaccatatcagtagacacgtccaagaaccagttctccctgaagctgagctctgtgaccgctgcggacacggccgtgtattactgtgcgagaacggataagcgatattgttccattaccagctgctaccagctggactcctggggccagggaaccctggtcaccgtctcatcag

SEQ ID NO: 11607 - DNA, 379 bp, Homo sapiens
caggtgcagctgcaggagtcgggcccaggactggtgaagccttcggagaccctgtccctcacctgcactgtctctggtggctccgtcagcagtggtagtgactactggaattggatccggcagcccccagggaagggactagagtggattgggtatgtctattacagtgggagcaccaactacaacccctccctcaagagtcgagtcaccatatcagtagacacgtccaagaaccagttctccctgaagctgagctctgtgaccgctgcggacacggccgtgtattactgtgcgagaacggataagcgatattgttccatcaccagctgctaccagctggactcctggggccagggaaccctggtcaccgtctcatcag

SEQ ID NO: 11608 - DNA, 364 bp, Homo sapiens
caggtgcagctggtggagtctgggggaggcgtggtccagcctgggaggtccctgagactctcctgtgcagcctctggattcatcttcaatacctatgctatcctctgggtccgccaggctccaggcaaggggctagagtgggtggcagttatatcatatgatggaactaataaatactacgcagactccgtgaagggccgattcaccatctccagagacaattccaagaacacgctgtatctgcaaatgaacagcctgagacctgaggacatggctgtgtattactgtgcgagaacaaccggtggaaactactacggcgcttttgatatctggggccaagggacaatggtcgccgtctcttcag

SEQ ID NO: 11609 - DNA, 364 bp, Homo sapiens
caggtgcagctggtggagtctgggggaggcgtggtccagcctgggaggtccctgagactctcctgtgcagcctctgaattcaccttcagtatctatgctatgcactgggtccgccaggctccaggcaaggggctagagtgggtggcagttgtatcatatgatggaagtaataaatactacgcagactccgtgaagggccgattcaccatctccagagacaattccaagaacacactgtatctgcaaatgaacagcctgagagctgaggacacggctgtgtattactgtgcgagagcaaccggtgggaactactacggcgcttttgatatctggggccaagggacaatggtcaccgtctcttcag

SEQ ID NO: 11610 - DNA, 352 bp, Homo sapiens
caggtgcaggtgcaggagtcgggcccaggactggtgaagccttcggagaccctgtccctcacctgcactgtctctggtggctccatgattagtcacttctggagctggatccggcagtccccagggaagggactggagtggattgggaatttctataatagtgggaccacaaactacaacccttccctcagtagtcgagtcaccatatcagtagacacgtccaagaaccaattctccctgaaaatgaactctgtgaccgctgcggactcggccatttattactgtgcgaccactcagacgtggctggcttttgatatctggggccaagggacaatggtcagcgtctcctcag

SEQ ID NO: 11611 - DNA, 352 bp, Homo sapiens; identical to SEQ ID NO: 11610

SEQ ID NO: 11612 - DNA, 355 bp, Homo sapiens
gaggtgcagctggttgagtctggaggaggcttgatccagcctggggggtccctgagactctcctgtgcagcctctgggttcaccgtcagtaccagctatatgagctgggtccgccaggctccagggaaggggctggagtgggtctcagttatttatagcggtggtaccacatactacgcagactccgtgaagggccgattcaccatttccagagacaattccaagaacacgctgtatcttcaaatgaacagcctgagagccgaggacacggccatgtattactgtgcgagagagcatggcagctcgtcctattttgattactggggccagggaaccctggtcaccgtctcctcag

SEQ ID NO: 11613 - DNA, 355 bp, Homo sapiens
gaggtgcagttggttgagtctggaggaggcttgatccagcctggggggtccctgagactctcctgtgcagcctctgggttcaccgtcagtaccagctatatgagctgggtccgccaggctccagggaaggggctggagtgggtctcagttatttatagcggtggtaccacatactacgcagactccgtgaagggccgattcaccatttccagagacaattccaagaacacgctgtatcttcaaatgaacagcctgagagccgaggacacggccatgtattactgtgcgagagagcatggcagctcgtcctattttgattactggggccagggaaccctggtcaccgtctcctcag

SEQ ID NO: 11614 - DNA, 385 bp, Homo sapiens
gaggtgcagctggtggagtctgggggaggcttggtacagcctggagggtccctgagactctcctgtgcagcctctggattcaccttcagtagttatgaaatgaactgggtccgccaggctccagggaaggggctggagtgggtttcatacattagtagtagtggtagtaccatatactacgcagactctgtgaagggccgattcaccatctccagagacaacgccaagaactcactgtatctgcaaatgaacagcctgagagccgaggacacggctgtttattactgtgcgagagaccgaacccagtattactatgatagtagtggttattaccgtgatgcttttgatatctggggccaagggacaatggtcaccgtctcttcag

SEQ ID NO: 11615 - DNA, 385 bp, Homo sapiens; identical to SEQ ID NO: 11614

SEQ ID NO: 11616 - DNA, 373 bp, Homo sapiens
caggtgcagctgcaggagtcgggcccaggactggtgaagccttcggagaccctgtccctcacctgcactgtctctggtggctccatcagtagttactactggagctggatccggcagcccccagggaagggactggagtggattgggtatatctattacagtgggagcaccaactacaacccctccctcaagagtcgagtcaccatatcagtagacacgtccaagaaccagttctccctgaagctgagctctgtgaccgctgcggacacggccgtgtattactgtgcgagagataagtgggtgagggactacggtggtaacttctactactttgactactggggccagggaaccctggtcaccgtctcctcag

SEQ ID NO: 11617 - DNA, 376 bp, Homo sapiens
gaggtgcagctggtggagtccgggggaggcttacttcagcctggggggtccctgagactctcctgtgcagcctctggattcaccttcagcacctatacgatgcactgggtccgccaagctccagggaaggggctggtgtgggtctcacatattaatgctgatgggagtagcacaaactacgcggactccgtgaagggccgattcaccatctccagagacaacgccaagaacaccctgtatctgcaaatgaacagtctcagagccgaggacacggctatgtattactgtgcaagagtcgtgggtataccagtggctggaacttgggccatctggctcgacccctggggccagggaaccctggtcaccgtctcctcag

SEQ ID NO: 11618 - DNA, 373 bp, Homo sapiens
caagtgcagctgcaggagtcgggcccaggactggtgaagccttcggagaccctgtccctcacctgcactgtctctggtggctccatcagtagttactactggacctggatccggcagcccccaggaaagggactggagtggattgggtatatctcttacactggggccagcatctacaacccctccctcgagagccgagtcaccatgtcagtagacacgtccaacaactacatctccctgagactgaggtctgtgaccgctgcggacacggccgtgtattactgtgcgggagatagttggttcgggcaatacagatatttgggcaactggttcgacccctggggccagggaaccctggtcaccgtctcctcag

SEQ ID NO: 11619 - DNA, 376 bp, Homo sapiens
caggtgcagctggtgcagtctggggctgaggtgaagaagcctggggcctcagtgaaggtctcctgcaaggcttctggatacaccttcaccagttatgatatcaactgggtgcgacaggccactggacaagggcttgagtggatgggatggatgaaccctaacagtggtaacacaggctatgcacagaagttccagggcagagtcaccatgaccaggaacacctccataagcacagcctacatggagctgagcagcctgagatctgaggacacggccgtgtattactgtgcgagaggggcccgtatcgacgatttttggagtggttggaactggttcgacccctggggccagggaaccctggtcaccgtctcctcag

SEQ ID NO: 11620 - DNA, 367 bp, Homo sapiens
caggtgcagctgatggagtctgggggaggcgtggtccagcctgggaggtccctgagactctcctgtgcagcctctggattcaccttcagtaactatgccatgcactgggtccgccaggctccaggcaaggggctggagtgggtgtctgttatatcatttgatggaaataataagtactatgtagactccgtgaagggccgattcaccatctccagagacaattccaagaacactctgtatctgcaaatgaccagcctgagaactgaggacacggctgtatattactgtgcgaaagatgtcgtgcctacggaattttgggatgcttttgatatctggggccaagggacaatggtcaccgtctcttcag

SEQ ID NO: 11621 - DNA, 370 bp, Homo sapiens
caggtgcagctgcaggagtcgggcccaggactggtgaagccttcacagaccctgtccctcacctgcactgtctctggtggctccatcagcagtggtgattattactggagctggatccgccagcacccagggaagggcctggagtggattgggcacatcttttacagtgggagcacctactccaacccgtccctcaagagccgaattaccctatcagtagacacgtctaagaaccagttgtccctgaagctgagctctgtgactgccgcggacacggccgtgtattactgtgcgcgagtaacttatgatagtagtggcctctactggttcgacccctggggccagggaaccctggtcaccgtctcctcag

SEQ ID NO: 11622 - DNA, 367 bp, Homo sapiens
caggttcagctggtgcagtctggagctgaggtgaagaagcctggggcctcagtgaaggtctcctgcaaggcttctggttacacgtttaccagccatggtatcaactgggtgcgacaggcccctggacaagggcttgagtggatgggatggatcaccacttacaatggtaacacaaactatgcacagaagttccagggcagagtcaccatgaccacagacacatccacgagcacaacctacatggagctgaggagcctgacatctgacgacacggccatgtattactgtgcgagaggtcgaactacggtgactgcccagcggtactttgactactggggccagggaaccctggtcaccgtctcctcag

SEQ ID NO: 11623 - DNA, 367 bp, Homo sapiens
gaggtgcagctggtggagtctgggggaggcctggtcaagcctggggggtccctgagactctcctgtgcagcctctggattcaccttcagtagctatagcatgaactgggtccgccaggctccagggaaggggctggagtgggtctcatccattagtagtagtagtagttacatatactacgcagactcagtgaagggccgattcaccatctccagagacaacgccaagaactcactgtatctgcaaatgaacagcctgagagccgaggacacggctgtgtattactgtgcgagagataagggtagcagcaactggtactggtacttcgatctctggggccgtggcaccctggtcactgtctcctcag

SEQ ID NO: 11624 - DNA, 372 bp, Homo sapiens
caggtgcagctacagcagtggggcgcaggactgttgaagccttcggagaccctgtccctcacctgcgctgtctatggtgggtccttcagtggttactactggagctggatccgccagcccccagggaaggggctggagtggattggggaaatcaatcatagtggaagcaccaactacaacccgtccctcaagagtcgagtcaccatatcagtagacacgtccaagaaccagttctccctgaagctgagctctgtgaccgccgcggacacggctgtgtattactgtgcgagttgggcgggaggaggttcgggcccctactactactacggtatggacgtctggggccaagggaccacggtcaccgtctcctca

SEQ ID NO: 11625 - DNA, 364 bp, Homo sapiens
caggtgcaactgcaggagtcgggcccaggacttgtgaagccttcggagaccctgtccctcacctgcactgtctctggtggctcgatcagtagttactactggagctggatccggcagcccccagggaagggactggagtggattgggtatatctattacagtgggatcaccaaccacaacccctccctcaagagtcgagtcaccatatcagtagacacgtccaagaaccagttctccctgaagctgagctctgtgaccgctgcggacacggccgtgtattattgtgcgagatcgccaatacgatttttggagaaggcctggttcgacccctggggccagggaaccctggtcaccgtctcctcag

SEQ ID NO: 11626 - DNA, 381 bp, Homo sapiens
cagctgcagctgcaggagtcgggcccaggactggtgaagccttcggagaccctgtccctcacctgcactgtctctggtggctccatcagcagtagtagttactactggggctggatccgccagcccccagggaaggggctggagtggattgggagtatctattatagtgggagcacctactacaacccgtccctcaagagtcgagtcaccatatccgtagacacgtccaagaaccagttctccctgaagctgagctctgtgaccgccgcagacacggctgtgtattactgtgcgagacaacgtgggacggcagcagctggctcgtactactactacggtatggacgtctggggccaagggaccacggtcaccgtctcctca

SEQ ID NO: 11627 - DNA, 366 bp, Homo sapiens
gaagtgcagctggtggagtctgggggagtcgtggtacagccgggggggtccctgagactctcctgtgcagcctctggattcacctttcatgattataatatgcactgggtccgtcaagctccggggaagggtctggagtgggtgtctcttattagttgggatggtggtagtacatactatgcagactctgtgaagggccgattcagcatctccagagacaacagcaaaaactccctgtatctgcaaatgaacagtctgagaactgaggacaccgccttgtattactgtgcaaaagaccttcgcgggggatatttctattacggtatggacgtctggggccaagggaccacggtcaccgtctcctca

SEQ ID NO: 11628 - DNA, 366 bp, Homo sapiens
gaggtgcagctggtggagtccgggggaggcttagttcagcctggggggtccctgagactctcctgtgcagcctctggattcaccttcagtagctactggatgcactgggtccgccaagctccagggaaggggctggtgtgggtctcacgtattaatagtgatgggagtagcacaagctacgcggactccgtgaagggccgattcaccatctccagagacaacgccaagaacacgctgtatctgcaaatgaacagtctgagagccgaggacacggctgtgtattactgtgcaaggcaaactggaaccttctactactactacggtatggacgtctggggccaagggaccacggtcaccgtctcctca

SEQ ID NO: 11629 - DNA, 367 bp, Homo sapiens
caggtgcacctggtggagtctgggggaggcgtggtccagcctgggaagtccctgagactctcctgtgcagcgtctggattcaccttcagtagttatggcatgcactgggtccgccaggctccaggcaaggggctggagtgggtggcctttatcgcacgcgatggaaataatcagtactattcagactccgtgaagggccgattcaccatctccagagacaattcgaagaacacgttgtttctgcaaatgaacagcctgagacctgaagaaacggctgtgtattactgtgccagagatgccctgtctgacgatttttggacctatttcgacccctggggccagggaaccctggtcaccgtctcctcag

SEQ ID NO: 11630 - DNA, 384 bp, Homo sapiens
gaggtgcagctggtggagtccgggggaggcttggtccagcctggggggtccctgaaactctcctgtgcagcctctgggttcaccttcagtggctctgctatgcactgggtccgccaggcttccgggaaagggctggagtgggttggccgtattagaagcaaagctaacagttacgcgacagcatatgctgcgtcggtgaaaggcaggttcaccatctccagagatgattcaaagaacacggcgtatctgcaaatgaacagcctgaaaaccgaggacacggccgtgtattactgtactagacgatacgatggttcggggagttattatgggaggaactacggtatggacgtctggggccaagggaccacggtcaccgtctcctca

SEQ ID NO: 11631 - DNA, 382 bp, Homo sapiens
caggtgcagctgcaggagtcgggcccaggactggtgaagccttcacagaccctgtccctcacctgcactgtctctggtggctccatcaacattggttattactactggagctggatccgccagctcccagggaagggcctggagtggattggatacatctattacagtgggatcacctactacaacccgtccctcaagagtcgagttaccatatcagtagacacgtctaaggaccagttctccctgaagctgaactctgtgactgccgcggacacggccgtgtattactgtgcgagagagtcccattgtagtactaccagctgctaccccaagggtgcttttgatatctggggccaagggacaatggtcaccgtctcttcag

SEQ ID NO: 11632 - DNA, 378 bp, Homo sapiens
caggtgcagctggtggagtctgggggaggcgtggtccagcctgggaggtccctgagactctcctgtgcagcctctggattcagtttcaggagttatggcatgcactgggtccgccaggctccaggcaaggggctggagtgggtggcagttatatcatatgatggaagtaataaatactatgcagactccgtgaagggccgattcaccatctccagagacaattccaagaacacgctgtatctgcaaatgaacagcctgagagctgaggacacggctgtgtattactgtgcgaaggattactatggttcgggggggatgtactactactactacggtatggacgtctggggccaggggaccacggtcaccgtctcctca

SEQ ID NO: 11633 - DNA, 379 bp, Homo sapiens
gaagtgcagctggtggaatctgggggaggcttggtacagcctggcaggtccctgagactctcctgtgcagcctctggattcacctttgatgattatgccatgcactgggtccggcaagctccagggaagggcctggagtgggtctcaggtattagttggaatagtggtagcataggctatgcggactctgtgaagggccgattcaccatctccagagacaacgccaaaaactccctgtatctgcaaatgaacagtctgagagctgaggacacggccttgtattactgtgcaaaatcttggggggactacagtaactacgttggaggggcttcctactttggctactggggccagggaaccctggtcaccgtctcctcag

SEQ ID NO: 11634 - DNA, 376 bp, Homo sapiens
caggtgcagctgcaggagtcgggcccaggactggtgaagccttcggagaccctgtccctcacctgcactgtctctggtggctccatcagtagttactactggagctggatccggcagcccccagggaagggactggagtggattgggtatatctattacagtgggagcaccaactacaacccctccctcaagagtcgagtcaccatatcagtagacacgtccaagaaccagttctccctgaagctgagctctgtgaccgctgcggacacggccgtgtattactgtgcgagagggtatagcagtggctggtacggggccggcggggagaactactttgactactggggccagggaaccctggtcaccgtctcctcag

SEQ ID NO: 11635 - DNA, 379 bp, Homo sapiens
caggtgcagctgcaggagtcgggcccaggactggtgaagccttcggagaccctgtccctcagctgcactgtctctggtgactccgtcagcagtgatggttactactggagctggatccggctgcccccagggaagggactggagtggattgggtatgtctactacagtgggcgcaccaactacaacccctccctcaagagtcgagtcaccatatcagtagacacgtccaagaaccagttctccctgaagctgagctctgtgaccgctgcggacacggccgtgttttactgtgcgagagcgaataggagatattgtactattaccgactgctatgtatttgactattggggccagggaaccctggtcaccgtctcctcag

SEQ ID NO: 11636 - DNA, 367 bp, Homo sapiens
caggtgcagctggtggagtctgggggaggcgtggtccagcctgggaggtccctgagactctcctgtgcagcctctggattcaccttcagtagctatggcatgcactgggtccgccaggctccaggcaaggggctggagtgggtggcagttatatcatatgatggaagtaataaatactatgcagactccgtgaagggccgattcaccatctccagagacaattccaagaacacgctgtatctgcaaatgaacagcctgagagctgaggacacggctgtgtattactgtgcgaaagatcacgtttttctcggatggaggttagcggggggctactggggccagggaaccctggtcaccgtctcctcag

SEQ ID NO: 11637 - DNA, 367 bp, Homo sapiens
caggtgcagctggtgcagtctggggctgaggtgaagaagcctggggcctcagtgaaggtctcctgcaaggcttctggatacaccttcaccggctactatatacactgggtgcgacaggcccctggacaagggcttgagtggatgggatggatcaaccctaacagtggtggcacaaactatgcacagaagtttcagggcagggtctccatgaccagggacacgtccatcaacacagcctacatggagctgagcaggctgagctctgacgacacggccgtgtattactgtgcgagagatatcgctacctatattttgactggttgctttgactactggggccagggaaccctggtcaccgtctcctcag

SEQ ID NO: 11638 - DNA, 367 bp, Homo sapiens
caggtgcagctggtgcagtctggggctgaggtgaagaagcctggggcctcagtgaaggtctcctgcaaggcttctggatacaccttcaccggctactatatgcactgggtgcgacaggcccctggacaagggcttgagtggatgggatggatcaaccctaacagtggtggcacaaactatgcacagaagtttcagggcagggtcaccatgaccagggacacgtccatcagcacagcctacatggagctgagcaggctgagatctgacgacacggccgtgtattactgtgcgagagactacggtgattacatacttttgtactactttgactactggggccagggaaccctggtcaccgtctcctcag

SEQ ID NO: 11639 - DNA, 373 bp, Homo sapiens
caggtgcagctacagcagtggggcgcaggactgttgaagccttcggagaccctgtccctcacctgcgctgtctatggtgggtccttcagtggttactactggagctggatccgccagcccccagggaaggggctggagtggattggggaaatcaatcatagtggaagcaccaactacaacccgtccctcaagagtcgagtcaccatatcagtagacacgtccaagaaccagttctccctgaagctgagctctgtgaccgccgcggacacggctgtgtattactgtgcgagggattaccgccggtattgtagtggtggtagctgctacctttttgactactggggccagggaaccctggtcaccgtctcctcag

SEQ ID NO: 11640 - DNA, 373 bp, Homo sapiens
caggtgcagctacagcagtggggcgcaggactgttgaagccttcggagaccctgtccctcacctgcgctgtctatggtgggtccttcagtggttactactggagctggatccgccagcccccagggaaggggctggagtggattggggaaatcaatcatagtggaagcaccaactacaacccgtccctcaagagtcgagtcaccatatcagtagacacgtccaagaaccagttctccctgaagctgagctctgtgaccgccgcggacacggctgtgtattactgtgcgagagggcctcgatttttggagtggttgaccccgacttcctggttcgacccctggggccagggaaccctggtcaccgtctcctcag

SEQ ID NO: 11641 - DNA, 373 bp, Homo sapiens
caggtgcagctacagcagtggggcgcaggactgttgaagccttcggagaccctgtccctcacctgcgctgtctatggtgggtccttcagtggttactactggagctggatccgccagcccccagggaaggggctggagtggattggggaaatcaatcatagtggaagcaccaactacaacccgtccctcaagagtcgagtcaccatatcagtagacacgtccaagaaccagttctccctgaagctgagctctgtgaccgccgcggacacggctgtgtattactgtgcgagagcgggcctcaacgcctatatagcagtggctccggggtggttcgacccctggggccagggaaccctggtcaccgtctcctcag

SEQ ID NO: 11642 - DNA, 361 bp, Homo sapiens
gaggtgcagctggtggagtctgggggaggcttggtccagcctggggggtccctgagactctcctgtgcagcctctggattcacctttagtagctattggatgagctgggtccgccaggctccagggaaggggctggagtgggtggcctacataaagcaagatggaagtgagaaatactatgtggactctgtgaagggccgattcaccatctccagagacaacgccaagaactcactgtatctgcaaatgaacagcctgagagccgaggacacggctctgtattactgtgcgagagtagagagggactacggtgacctgcttgactactggggccagggaaccctggtcaccgtctcctcag

SEQ ID NO: 11643 - DNA, 382 bp, Homo sapiens
caggtgcagctgcaggagtcgggcccaggactggtgaagccttcacagaccctgtccctcacctgcactgtctctggtggctccatcagcagtggtgattactactggagttggatccgccagcccccagggaagggcctggagtggattgggtacatctattacagtgggagcacctactacaacccgtccctcaagagtcgagttaccatatcagtagacacgtccaagaaccagttctccctgaagctgagctctgtgaccgccgcggacacggctgtgtattactgtgcgagaggccgggatattttgactggttattaccgacaaactgatgcttttgatatctggggccaagggacaatggtcaccgtctcttcag

SEQ ID NO: 11644 - DNA, 364 bp, Homo sapiens
caggtgcagctgcaggagtcgggcccaggactggtgaagccttcggagaccctgtccctcacctgcactgtctctgctggctccatcagtcgttacttctggagctgggtccggcagcccccagggaagggactggaatggattgggtttattcattacagtgggagcaccacctacaacccctccctcaagagtcgagtcaccatatcagtagacacgtccaagaaccagttctccctgaacctgagctctgtgaccgctgcggacacggccgtgtattactgtgcgagagtaaatattgagtatagtagtacttactacatcacctactggggccagggaaccctggtcaccgtctcctcag

SEQ ID NO: 11645 - DNA, 364 bp, Homo sapiens
caggtgcagctgcaggagtcgggcccaggactggtgaagccttcggagaccctgtccctcacctgcactgtctctggtggctccatcagaagttactactggagctggatccggcagcccccagggaaaggactggagtggattgggtatatctattacagtgggagcaccaactacaacccctccctcaagagtcgagtcaccatgtcagtagacacgtccaagaaccagttctccctgaacctgagctctgtgaccgccgcagacacggccgtgtattactgtgcgagacgatattgtagtagtaccagctgcttctactttgactactggggccagggaaccctggtcaccgtctcctcag

SEQ ID NO: 11646 - DNA, 352 bp, Homo sapiens
caggtgcagctgcaggagtcgggcccaggactggtgaagccttcggagaccctgtccctcacctgcactgtctctagtggtaacttctggagctggatccggcagcccccagggaagggactggagtggattgggaatatcttttacagtgggagcaccaactacaacccctccctcaagagtcgagtcaccatatcagtggacacgtccaagaaccagttctccctgaagctgagctctatgaccgctgcggacacggccatgtattactgtgcgagaggctcgcttcggtatagcagcagctcctactttgactactggggccagggaaccctggtcaccgtctcctcag

SEQ ID NO: 11647 - DNA, 382 bp, Homo sapiens
cagttgcagctgcaggagtcgggcccaggactggtgaagccttcggagaccctgtccctcacctgcactgtctctggtgactccatctacagtagtagttactactggggctggatccgccagcccccaggaaaggggctggagtggattgcaagtatctattatagtgggaccacctactacaacccgtccctcaagagtcgagtcaccatttccgtagactcgtccaacaaccagttcgccctggaactgaactctgtgaccgccgcagacacggctgtgtattactgtgcgagacgcgcgggctactatgacagtagtggttacttatactggtacttcgatctctggggccgtggcaccctggtcactgtctcctcag

SEQ ID NO: 11648 - DNA, 361 bp, Homo sapiens
gaggtgcagctggtggagtccgggggaggcttagttcagcctggggggtccctgagactctcctgtgcagcctctggattcactttcagtagttactggatgcaatgggtccgccaagctccagggaaggggctggtgtgggtctcacgtattaatcctgatgggactcagacaaactacgcggacgccctgaagggccgattcaccatctccagagacaacgccgagaacacgctgtatctgcaaattaacaatctgagagccgaggacacggctgtgtattactgtgcaagagggaataattggaactacggtaactatgactcctggggccagggaaccctggtcaccgtctcctcag

SEQ ID NO: 11649 - DNA, 375 bp, Homo sapiens
caggtgcagctacagcagtggggcgcaggactgttgaagccttcggagaccctgtccctcacctgcgctgtctatggtgggtccttcagtggttactactggagctggatccgccagcccccagggaaggggctggagtggattggggaaatcaatcatagtggaagcaccaactacaacccgtccctcaagagtcgagtcaccatatcagtagacacgtccaagaaccagttctccctgaagctgagctctgtgaccgccgcggacacggctgtgtattactgtgcgagacggaccccccgattttacgatttttggagtggttcatggggtatggacgtctggggccaagggaccacggtcaccgtctcctca

SEQ ID NO: 11650 - DNA, 375 bp, Homo sapiens
caggtgcacctacagcagtggggcgcaggactgttgaagccttcggagaccctgtccctcacctgcgatgtctatggtgggtccttcattggttactacgggagctggatccgccagcccccagggaaggggctggagtggattggggaaatcaatcatagtggaagctccaactacaacccgtccctcaagagtcgagtcaccatatcagtagacacgtccaagaaccagttctccctgaacctgagctctgtgaccgccgcggacacggctgtgtattactgtgcgagaggccggctacgtggcagctcagccttctcccccctatacggtatggacgtctggggccaagggaccacggtcaccgtctcctca

SEQ ID NO: 11651 - DNA, 363 bp, Homo sapiens
caggtgcagctgcaggagtcgggcccaggactggtgaagccttcacagaccctgtccctcacctgcactgtctctggtggctccatcagcagtggtggttactactggagctggatccgccagcacccagggaagggcctggagtggattgggtacatctattacagtgggagcacctactacaacccgtccctcaagagtcgagttaccatatcagtagacacgtctaagaaccagttctccctgaagctgagctctgtgactgccgcggacacggccgtgtattactgtgcgagagagggcagctggtcctactacggtatggacgtctggggccaagggaccacggtcaccgtctcctca

SEQ ID NO: 11652 - DNA, 358 bp, Homo sapiens
caggtgcagctgcaggagtcgggcccaggactggtgaagccttcggagaccctgtccctcacctgcactgtctctggtggctccatcagtcattactactggagctggatccggcagcccccagggaagggactggagtggattgggtatatctcttacactgggagcaccacctacaacccctccctcaagagtcgagtcaccatatcagtagacacgtccaagagccagttgtccctgaagctgagctctgtgaccgctgcggacacggccgtgtattactgtgcgagagattttgggggtatcttgggctggttcgacccctggggccagggaaccctggtcaccgtctcctcag

SEQ ID NO: 11653 - DNA, 367 bp, Homo sapiens
gaggtgcagctgttggagtctgggggaggcttggtacagcctggggggtccctgagactctcctgtgcagcctctggattcacctttagcagctatgccatgagctgggtccgccaggctccagggaaggggctggagtgggtctcagctattagtggtagtggtggtagcacatactacgcagactccgtgaagggccggttcaccatctccagagacaattccaagaacacgctgtatctgcaaatgaacagcctgagagccgaggacacggccgtatattactgtgcgaaagatggggttggtggctggtatttcggtccttttgactactggggccagggaaccctggtcaccgtctcctcag

SEQ ID NO: 11654 - DNA, 367 bp, Homo sapiens
gaggtgcagctgttggagtctgggggaggcttggtacagcctggggggtccctgagactctcctgtgcagcctctgaattcacctttagcagctatggcatgacctgggtccgccaggctccagggaaggggctggagtgggtctcagccattagtggtagtggtagtagcacatactacgcagactccgtgaagggccggttcaccatctccagagacaattccaagaatacactgtatctacaaatgaacagcctgagagccgaggacacggccgtatattattgtgcgaaagatcccttaggggcagctagtaagagggggtttgactactggggccagggaaccctggtcaccgtctcctcag

SEQ ID NO: 11655 - DNA, 367 bp, Homo sapiens
gaggtgcagctgttggagtctgggggaggcttggtacagcctggggggtccctgagactctcctgtgcagcctctggattcacctttagcagctatgccatgagctgggtccgccaggctccagggaaggggctggagtgggtctcagctattagtggtagtggtggtagcacatactacgcagactccgtgaagggccggttcaccatctccagagacaattccaagaacacgctgtatctgcaaatgaacagcctgagagccgaggacacggccgtatattactgtgcgaaacagagccacaggtattactatgatagtagtggtccggaatggggccagggaaccctggtcaccgtctcctcag

SEQ ID NO: 11656 - DNA, 358 bp, Homo sapiens
caggtgcagctgcaggagtcgggcccaggactggggaagccttcggagaccctgtccctcacctgcactgtctctggtgcctccatcagtagtttctactggaactggatccgtcagcccccagggaagggactggagtggatcggttatatacattacagtgggagcaacaactacaacccctccctcaagagtcgagtcaccatgtcagtagacacggccaagaaccagatctccttgaagctgaactctgtgaccgctgcggacacggccctgtattactgtgcgaggtggaatgatgattctttgcgtgcttttgatatttggggccaagggacaaaggtcaccgtctcttcag

SEQ ID NO: 11657 - DNA, 376 bp, Homo sapiens
gaggtgcagctgttggagtctgggggaggcttggtacagcctggggggtccctgagactctcctgtgcagcctctggattcacctttagcagctatgccatgagctgggtccgccaggctccagggaaggggctggagtgggtctcagctattagtggtagtggtggtagcacatactacgcagactccgtgaagggccggttcaccatctccagagacaattccaagaacacgctgtatctgcaaatgaacagcctgagagccgaggacacggccgtatattactgtgcgaaagattctacgtattactatgatagtagtggttattcccccattgactactggggccagggaaccctggtcaccgtctcctcag

SEQ ID NO: 11658 - DNA, 376 bp, Homo sapiens
gaggtgcagttgttggagtctgggggaggcttggtacagcctggggggtccctgagactctcctgtgcagcctctggattcacctttagcagctatgccatgagctgggtccgccaggctccagggaaggggctggagtgggtctcaggtattagtgctggtggtggtaacacatactacgcagactccgtgaagggccggttcaccatctccagagacaattccaagaacacggtgtatctgcaaatgaacagcctgagagccgaggacacggccatatattactgtgcgaaaatgtccgcgggatattgtgctaatggtgtatgtcgttactttgactactggggccagggaaccctggtcaccgtctcctcag

SEQ ID NO: 11659 - DNA, 376 bp, Homo sapiens
gaggtgcagctgttggagtctgggggaggcttggtacagcctggggggtccctgagactctcctgtgcagcctctgcatttacctttagcacccatgccatgacctgggtccgccaggctccagggaagggactggaatgggtctcaagtattagtggtggtggcggtagtacatactccgcagactccgtgaagggccggttcaccatctccagagacaatgccaagaacacgctgtatctggaaatgaacagcctgagagccgaggacacggccatatattactgtgcgaaatgcggggggccgactgatagtagcagctggtacctctactttgactactggggccagggaaccctggtcaccgtctcctcag

SEQ ID NO: 11660 - DNA, 374 bp, Homo sapiens
gaggtgcaactgttggagtctgggggaggcttcgtacagccgggggggtccctgagactctcctgtgcagcctctggattcacctttagcagttatgccatgacctgggtccgccaggctccagggaaggggctggagtggatctcagggattgttagtaacagtggtcgcacgtattatgttgactccgtgaagggccggttcaccatctccagagacaattccaagaagaccctgtatctgcaaatgaacagcctgagacccgaggacacgggcgtctattactgtgcgaaaactcggggacaacgatatcttgactcgcctccttactactttgacttctggggccagggaaccctggtcaacgtcgcctc

SEQ ID NO: 11661 - DNA, 372 bp, Homo sapiens
cagctgcagctgcaggagtcgggcccaggactggtgaaaccttcggagaccctgtccctcacctgcactgtctctggtgactccgtcagcagtagtagctactactggggctggatccgccagcccccagggaaggggctggagtggattgggagtatctattatagtgggaacacctactacaacccgtccctcaggagtcgagtcaccatatccgtagacacgtccaagaatcagttctccctgaagctgagctctgtgaccgccgcagacacggctgtgtattactgtgcgagacatgacagtagtaccagcagagaagtctacggtatggacgtctggggccaagggaccacggtcaccgtctcctca

SEQ ID NO: 11662 - DNA, 369 bp, Homo sapiens
caggtgcagctggtgcagtctggggctgaggtgaagaagcctgggtcctcggtgaaggtctcctgcaaggcttctggaggcaccttcagcagctatgctatcaactgggtgcgacaggcccctggacaagggcttgagtggatgggagggatcatccctatctttggtacaacaaactacgcacagaagttccagggcagagtcacgattaccgcggacgaatccacgagcacagcctacatggagctgagcagcctgagatctgaggacacggccgtgtattactgtgcgaaattggactacggtgatgagtactacaactacggcatggacgtctggggccaagggaccacggtcaccgtctcctca

SEQ ID NO: 11663 - DNA, 361 bp, Homo sapiens
caggtgcaggtggtgcagtctggggctgaggtgaagaagcctggggcctcagtgaaggtttcctgcaaggcatctggaaacaccttcaccagcttctatatgcactgggtgcgacaggcccctggacaagggcttgagtggatgggaataatcaaccctagtggtggtagcacaagctacacacagaagttccagggcagagtcaccatgaccagggacacgtccacgagcacagtctacatggagctgagcagcctgagatctgaggacacggccgtgtattactgtgcgggtacgatttttggagtaattagtccctttgacttctggggccagggaaccctggtcaccgtctcctcag

SEQ ID NO: 11664 - DNA, 361 bp, Homo sapiens
caggtgcagctggtgcagtctggggctgaggtgaagaagcctggggcctcagtgaaggtttcctgcaaggcatctggatacaccttcaccagctactatatgcactgggtgcgacaggcccctggacaagggcttgagtggatgggaataatcaaccctagtggtggtagcacaagctacgcacagaagttccagggcagagtcaccatgaccagggacacgtccacgagcacagtctacatggagctgagcagcctgagatctgaggacacggccgtgtattactgtgctagagattatagcagtggctgggaaccttttgactactggggccagggaaccctggtcaccgtctcctcag

SEQ ID NO: 11665 - DNA, 361 bp, Homo sapiens
gaggtgcagctggtgcagtctggagcagaggtgaaaaagccgggggagtctctgaagatctcctgtaagggttctggatacagctttaccagctactggatcggctgggtgcgccagatgcccgggaaaggcctggagtggatggggatcatctatcctggtgactctgataccagatacagcccgtccttccaaggccaggtcaccatctcagccgacaagtccatcagcaccgcctacctgcagtggagcagcctgaaggcctcggacaccgccatgtattactgtgcgaggggaggggtatacagctatggttcctttgactactggggccagggaaccctggtcaccgtctcctcag

SEQ ID NO: 11666 - DNA, 361 bp, Homo sapiens
gaggtgcagctggtgcagtctggagcagaggtgaaaaagccgggggagtctctgaagatctcctgtaaggcttctggatacagtttctccaactattggatcggctgggtgcgccagatgcccgggaaaggcctggaatggatggggattatctatcctggtgactctgataccagatacagcccgtccttccgaggccaggtcaccatctcagtcgacaagtccatcaacaccgcctacctgcagtggagcagcctgaaggcctcggacagcgccatgtactactgtgcgagatggaccagcaacgaaccttactactttgactactgggcccagggaaccctggtcaccgtctcctcag

SEQ ID NO: 11667 - DNA, 369 bp, Homo sapiens
gaggtgcagctggtggagtctgggggaggcttggtacagcctggggggtccctgagactctcctgtgcagcctctggattcaccttcagtagctatagcatgaactgggtccgccaggctccagggaaggggctggagtgggtttcatacattagtagtagtagtagtaccatatactacgcagactctgtgaagggccgattcaccatctccagagacaatgccaagaactcactgtatctgcaaatgaacagcctgagagacgaggacacggctgtgtattactgtgcgagagaggtaggagctctaggctactactactacggtatggacgtctggggccaagggaccacggtcaccgtctcctca

SEQ ID NO: 11668 - DNA, 361 bp, Homo sapiens
caggtgcagctggtggagtctgggggaggcgtggtccagcctgggaggtccctgagactctcctgtgcagcctctggattcaccttcagtagctatgctatgcactgggtccgccaggctccaggcaaggggctagagtgggtggcagttatatcatatgatggaagtaataaatactacgcagactccgtgaagggccgattcaccatctccagagacaattccaagaacacgctgtatctgcaaatgaacagcctgagagctgaggacacggctgtgtattactgtgcgaggggcgatttttggagtggttattctattgactactggggccagggaaccctggtcaccgtctcctcag

SEQ ID NO: 11669 - DNA, 361 bp, Homo sapiens
caggtgcagctggtggagtctgggggaggcgtggtccagcctgggaggtccctgagactctcctgtgcagcctctggattcaccttcagtagctatgctatgcactgggtccgccaggctccaggcaaggggctagagtgggtggcagttatatcatatgatggaagtaataaatactacgcagactccgtgaagggccgattcaccatctccagagacaattccaagaacacgctgtatctgcaaatgaacagcctgagagctgaggacacggctgtgtattactgtgcgaggggtaatggtggttattactcccactttgactactggggccagggaaccctggtcaccgtctcctcag

SEQ ID NO: 11670 - DNA, 361 bp, Homo sapiens
caggtgcagctggtggagtctgggggaggcgtggtccagcctgggaggtccctgagactctcctgtgcagtctctggattcaccttcagtacctatgctatacactgggtccgccaggctccaggcaaggggctagagtgggtggcagttatatcatatgatggaaataataaatattacgcagactccgtgaagggccgattcaccatctccagagacaattccaagaacacgctgtatctgcaaatgagcagcctgagagctgaggacacggctgtgtattactgtgcgaggggacatagtgggaactactggtactttgactactggggccagggaaccctggtcaccgtctcctcag

SEQ ID NO: 11671 - DNA, 366 bp, Homo sapiens
caggtgcagctgcaggagtcgggcccaggactggtgaagccttcggagaccctgtccctcacctgcactgtctctggtggctccatcagtagttactactggagctggatccggcagcccccagggaagggactggagtggattgggtatatctattacagtgggagcaccaactacaacccctccctcaagagtcgagtcaccatatcagtagacacgtccaagaaccagttctccctgaagctgagctctgtgaccgccgcagacacggccgtgtattactgtgcgagacacggtgactacgtcctctactactactacggtatggacgtctggggccaagggaccacggtcaccgtctcctca

SEQ ID NO: 11672 - DNA, 366 bp, Homo sapiens
caggtgcagctgcaggagtcgggcccaggactggtgaagccttcggagaccctgtccctcacctgcactgtctctggtggctccatcagtagttactactggagctggatccggcagcccccagggaagggactggagtggattgggtatatctattacagtgggagcaccaactacaacccctccctcaagagtcgagtcaccatatcagtagacacgtccaagaaccagttctccctgaagctgagctctgtgaccgccgcagacacggccgtgtattactgtgcgagaattgtggtggtgactgggggggactactacggtatggacgtctggggccaagggaccacggtcaccgtctcctca

SEQ ID NO: 11673 - DNA, 370 bp, Homo sapiens
gaagtgcagctggtggagtctgggggaggcttggtacagcctggcaggtccctgagactctcctgtgcagcctctggattcacctttgatgattatgccatgcactgggtccggcaagctccagggaagggcctggagtgggtctcaggtattagttggaatagtggtagcataggctatgcggactctgtgaagggccgattctccatctccagagacaacgccaagaactccctgtatctgcaaatgaacagtctgagagctgaggacacggccttctattactgtgcaaaagataccggaacgtttgtgactacggacaactggttcgacccctggggccagggaaccctggtcaccgtctcctcag

SEQ ID NO: 11674 - DNA, 361 bp, Homo sapiens
caggtgcagctggtggagtctgggggaggcgtggtccagcctggtaggtccctgagactctcctgtgcagcctctggattcaccttcagtagttttgctatgcactgggtccgccaggctccaggcaaggggctagagtggatggccgttatttcatatgatggaaataataaatactacacagactccgtgaagggccgattcaccatctccagagacaattccaagaacacgctgtatctgcaaatgaacagcctgagagctgaggacacggctgtgtattactgtgcgagaggtgacggaaactactacagtgcttttgatatctggggccaagggacaatggtcaccgtctcttcag

SEQ ID NO: 11675 - DNA, 358 bp, Homo sapiens
caggtgcacctgcaggagtcgggcccaggactggtgaagccttcggagaccctgtccctcacctgcactgtctctggtggctccatcagtggttactactggagctggatccggcagcccccagggaagggactggagtggattggatatatctattacagtgggaccaccaggtacaatccctccctcaacagtcgagtcaccatatcattagacacgtccaagaaccagttctccctgaagctgagctctgtgaccgctgcggacacggccgtgtattattgtacgagactccatgcctatcgttacgaagaatttgactactggggccagggaaccctggtcaccgtctcctcag

SEQ ID NO: 11676 - DNA, 370 bp, Homo sapiens
caggtgcaactggtggagtctgggggaggcgtggtccagcctgggaggtccctgatactctcctgtgcagcctctggattcaccttcagtagctttcctatgcactgggtccgccaggctccaggcagggggctagagtgggtggcacttatatcaaaagatggaagtattaaatcctacgcagactccgtgaagggccgatccaccatctccagagacaattccaagaacacgctgtatctgcaaatgaacagcctgagagttgaggacacggctgtgtattattgtgcgagagaccccggattagcaatgtctgttagaaggggctttgactactggggccagggaaccctggtcaccgtctcctcag

SEQ ID NO: 11677 - DNA, 370 bp, Homo sapiens
gaggtgcagttgttggagtctgggggaggcttagtacagcctggggggtccctgagactctcctgtgcagcgtctgaattcacatttagcaactatgccatgacctgggtccgccaggctccagggaaggggctggaatgggtctcaactattagtggtagtggtggtaccacatactacgcggactccgtgaagggccggttcaccgtctccagagacaattccatgaacactctgtttctgcagatgaagagcctgagagccgaggacacggccttatattactgtgcgaaaccccggactagtatagcatcagctgtgactttctttgactactggggccagggaaccctggtcaccgtctcctcag

SEQ ID NO: 11678 - DNA, 370 bp, Homo sapiens
gaggtgcagctggtggagtctgggggaggcttggttcagcctggagggtccctgagactctcctgtgcagcctctggattcaccttcagtagttatgaaatgaactgggtccgccaggctccagggaaggggctggagtgggtttcatacattagtagtagtggtagtaccatatattacgcagactctgtgaagggccgattcaccatctccagagacaacgccaagaactcactgtatctgcaaatgaacagcctgagagccgaggacacggctatttattactgtgcgagagattctcgttctatggttcggggagtgacccactttgactactggggccagggaaccctggtcaccgtctcctcag

SEQ ID NO: 11679 - DNA, 370 bp, Homo sapiens
caggttcagctggtgcagtctggagctgaggtgaagaagcctggggcctcagtgaaggtctcctgcaaggcttctggttacacctttaccagctatggtatcagctgggtgcgacaggcccctggacaagggcttgagtggatgggatggatcagcgcttacaatggtaacacaaactatgcacagaagctccagggcagagtcaccatgaccacagacacatccacgagcacagcctacatggagctgaggagcctgagatctgacgacacggccgtgtattactgtgcgaggacgtattacgatttttggagtggttattactactttgactactggggccagggaaccctggtcaccgtctcctcag

SEQ ID NO: 11680 - DNA, 369 bp, Homo sapiens
gaggtgcagctgttggagtctgggggaggcttggtacagcctggggggtccctgagactctcctgtgcagcctctggattcacctttagcagctatgccatgagctgggtccgccaggctccagggaaggggctggagtgggtctcagctattagtggtagtggtggtagcacatactacgcagactccgtgaagggccggttcaccatctccagagacaattccaagaacacgctgtatctgcaaatgaacagcctgagagccgaggacacggccgtatattactgtgcgaaagatcgcatagggccgtattacgatttttccggtatggacgtctggggccaagggaccacggtcaccgtctcctca

SEQ ID NO: 11681 - DNA, 369 bp, Homo sapiens
gaggtgcagctgttggagtctgggggaggcttggtacagcctggggggtccctgagactctcctgtgcagcctctggattcacctttagcagctatgccatgagctgggtccgccaggctccagggaaggggctggagtgggtctcagctattagtggtagtggtggtagcacatactacgcagactccgtgaagggccggttcaccatctccagagacaattccaagaacacgctgtatctgcaaatgaacagcctgagagccgaggacacggccgtatattactgtgcgaaagatgacttgccctccttctactactactacggtatggacgtctggggccaagggaccacggtcaccgtctcctca

SEQ ID NO: 11682 - DNA, 370 bp, Homo sapiens
caggtgcagctggtgcagtctggggctgaggtgaagaagcctggggcctcagtgaaggtctcctgcaaggcttctggatacaccttcaccggctactttttgcactgggtgcgacaggcccctggacaagggcttgagtggatgggatggatcaaccctaacagtggtggcacaaagtatgcacagaagtttcagggcagggtcaccatgaccagggacacgtccatcagcacagcctacatggagctgagcaggctgacatctgacgacacggccgtgtattactgtgcgagaattccgaccccctttgctagtgattattacatatcggactactgggcccagggaaccctggtcaccgtctcctcag

SEQ ID NO: 11683 - DNA, 370 bp, Homo sapiens
caggtgcagctggtgcagtctggggctgaggtgaagaagcctggggcctcagtgaaggtctcctgcaaggcttctggatacaccttcaccggctactatatgcactgggtgcgacaggcccctggacaagggcttgagtggatgggatggatcaaccctaacagtggtggcacaaactatgcacagaagtttcagggcagggtcaccatgaccagggacacgtccatcagcacagcctacatggagctgagcaggctgagatctgacgacacggccgtgtattactgtgcgagagaagggggagggagctactcaggcatcgctctctttgactactggggccagggaaccctggtcaccgtctcctcag

SEQ ID NO: 11684 - DNA, 367 bp, Homo sapiens
gaggtgcagctggtggagtctggaggaggcttgatccagcctggggggtccctgagactctcctgtgcagcctctgggttcaccgtcagtagcaactacatgagctgggtccgccaggctccagggaaggggctggagtgggtctcagttatttatagcggtggtagcacatactacgcagactccgtgaagggccgattcaccatctccagagacaattccaagaacacgctgtatcttcaaatgaacagcctgagagccgaggacacggccgtgtattactgtgcgatgggcgggcccccacagagatggctacaaccaccacatgactactggggccagggaaccctggtcaccgtctcctcag

SEQ ID NO: 11685 - DNA, 370 bp, Homo sapiens
gaggtgcagctggtggagtctgggggaggcttggtccagcctggggggtccctgagactctcctgtgcagcctctggattcacctttagtagctattggatgagctgggtccgccaggctccagggaaggggctggagtgggtggccaacataaagcaagatggaagtgagaaatactatgtggactctgtgaagggccgattcaccatctccagagacaacgccaagaactcactgtatctgcaaatgaacagcctgagagccgaggacacggctgtgtattactgtgcgagagcccaaatggggcagtggctgccttttggtgcttttgatatctggggccaagggacaatggtcaccgtctcttcag

SEQ ID NO: 11686 - DNA, 370 bp, Homo sapiens
caggtgcagctggtgcagtctggggctgaggtgaagaagcctgggtcctcggtgaaggtctcctgcaaggcttctggaggcaccttcagcagttatgctatcagctgggtgcgacaggcccctggacaagggcttgagtggatgggagggatcatccctttctttggtttagcaaactacgcacagaagttccagggcagagtcacgattaccgcggacgaatccacgagcacagcctacatggagctgagcagcctgagatctgaggacacggccgtgtattactgtgcgattctaatacccaggggtgagtgggagctacactactttgactactggggccagggaaccctggtcaccgtctcctcag

SEQ ID NO: 11687 - DNA, 360 bp, Homo sapiens
gaggagcagctgttggagtctgggggaggcttggtacagcctggggggtccctgagactctcctgtgcagcctctggaatcacctttaacagttatgccatgagctgggtccgccaggctccagggaaggggctggagtgggtctcagctattagtggtagtggcgctagcatatactacgcagactccgtgaagggccggttcaccatctcaagagacaattccaagaacacgctgtatctgcaaatgaacagtctgagagccgaggacacggccatatattactgtgcgaaagatcacgcagctatggtttacggtatggacgtctggggccaagggaccacggtcaccgtctcctca

SEQ ID NO: 11688 - DNA, 364 bp, Homo sapiens
gaggtgcagctggtggagtctgggggaggcctggtcaagccgggggggtccctgagactctcctgtgctgcctctggattcaccttcagttcccataccatgacgtgggtccgccagcctccagggaagggtctggagtgggtctcatccattactggaaatagtaggtacatctactccgcagactctttgaagggccgattcaccatctccagagacaacaccaagaactcactgtatctgcagatggacaacctgagagccgaggacacggctatctattactgtgcgagggcccatgatttttggagtggttatcctcttgacttctggggccagggaaccctggtcaccgtctcctcag

SEQ ID NO: 11689 - DNA, 364 bp, Homo sapiens
caggtgcagctggtggagtctgggggaggcttggtcaagcctggagggtccctgagactctcctgtgcagcctctggattcaccttcagtgactactacatgagctggatccgccaggctccagggaaggggctggagtgggtttcatacattagtagtagtggtagtaccatatactacgcagactctgtgaagggccgattcaccatctccagggacaacgccaagaactcactgtatctgcaaatgaacagcctgagagccgaggacacggccgtgtattactgtgcgagagatattgtagtagtaccagctgctctttttgactactggggccagggaaccctggtcaccgtctcctcag

SEQ ID NO: 11690 - DNA, 363 bp, Homo sapiens
aggtgcagctggtggagtctgggggaggcgtggtccagcctgggaggtccctgagactctcctgtgcagcctctggattcaccttcagtagctatagcatgaactgggtccgccaggctccagggaaggggctggagtgggtctcagctattagtggtagtggtggtagcacatactacgcagactccgtgaagggccggttcaccatctccagagacaattccaagaacacgctgtatttggaagtgagcagcctgagaactgaggacacggctgtgtattactgtgcaagaactaacaatgggaactacaacggctactttgactactggggccagggaaccctggtcaccgtctcctcag

SEQ ID NO: 11691 - DNA, 362 bp, Homo sapiens
caggtgcagttggtggagtcggggggaggcgtggtccagcctgggacgtccctgagactctcctgtgcagcgtctggattcacatttaggagttatggcatgaactgggtccgccaggctccaggcaaggggctggagtgggtggcagtcatttggtatgacggaagtaaaagatattatgcagactctgtgaagggccgattcaccaccttcagagacaataccagaaacacactatttctgcaaatgaacagcctcagagtcgaggacacggctgtatattattgtgcgagagaaggggactacgagggaggtgatgactttgaccattggggccagggaacactggtcaccgtctcctc

SEQ ID NO: 11692 - DNA, 364 bp, Homo sapiens
caggtgcagctggtggagtctgggggaggcgtggtccagcctgggaggtccctgagactctcctgtgcagcgtctggattcaccttcagtagctatggcatgcactgggtccgccaggctccaggcaaggggctggagtgggtggcagttatatggtatgatggaagtaataaatactatgcagactctgtgaagggccgattcaccatctccagagacaattccaagaacacgctgtatctgcaaatgaacagcctgagagccgaggacacggctgtgtattactgtgcgagagatgggatggtgggagctactactgggattgactactggggccagggaaccctggtcaccgtctcctcag

SEQ ID NO: 11693 - DNA, 364 bp, Homo sapiens
gaggtgcagctggtggagtctgggggaggcttggtccagcctggggggtccctgagactctcctgtgtagactctggattcaccatcagtaggttttggatgacctgggtccgccaggctccagggaaggggctggagtgggtggccaacataaagcaagatggaagtgagaaatactatgtgggctctgtgaagggccgattcaccgtctccagagacaacgccaagagctcagtgtatctgcaaatgaacagcctgagagccgaggacacggctatgtattactgtgcgaggtttttacatggcagtggctggtaccaacccaagccctggggcctagggacaatggtcaccgtctcttcag

SEQ ID NO: 11694 - DNA, 364 bp, Homo sapiens
caggtgcagctggtgcagtctggggctgaggtgaagaagcctggggcctcagtgaaggtctcctgcaaggcttctggatacaccttcaccggctactatatgcactgggtgcgacaggcccctggacaagggcttgagtggatgggatggatcaaccctaacagtggtggcacaaactatgcacagaagtttcagggcagggtcaccatgaccagggacacgtccatcagcacagcctacatggagctgagcaggctgagatctgacgacacggccgtgtattactgtgcgagggaatccagtagtggacccacctactactttgactactggggccagggaaccctggtcaccgtctcctcag

SEQ ID NO: 11695 - DNA, 364 bp, Homo sapiens
caggtgcagctggtgcagtctggggctgaggtgaagaagcctggggcctcagtgaaggtctcctgcaaggcttctggatacaccttcaccggctactatatgcactgggtgcgacaggcccctggacaagggcttgagtggatgggatggatcaaccctaacagtggtggcacaaactatgcacagaagtttcagggcagggtcaccatgaccagggacacgtccatcagcacagcctacatggagctgagcaggctgagatctgacgacacggccgtgtattactgtgcgaggggttccgaattacgatttttggagtggttctcttactggggccagggaaccctggtcaccgtctcctcag

SEQ ID NO: 11696 - DNA, 364 bp, Homo sapiens
gaggtgcagctggtggagtctgggggaggcttggtccagcctggggggtccctgagactctcctgtgcagcctctggattcacctttagtagctattggatgagctgggtccgccaggctccagggaaggggctggagtgggtggccaacataaagcaagatggaagtgagaaatactatgtggactctgtgaagggccgattcaccatctccagagacaacgccaagaactcactgtatctgcaaatgaacagcctgagagccgaggacacggctgtgtattactgtgcgggggggagtcgatttttggagtggtctcccgttcactactggggccagggaaccctggtcaccgtctcctcag

SEQ ID NO: 11697 - DNA, 367 bp, Homo sapiens
caggtgcagctgcaggagtcgggcccaggactggtgaagccttcacagaccctgtccctcacctgcactgtctctggtggctccatcagcagtggtggtgactactggagctggatccgccagcacccagggaagggcctggagtggattgggttcatctattacagtgggaacacctactacaacccgtccctcaagagtctagttagcatatcactagacacgtctaagaaccagttctccctgaaggtgacctctgtgactgccgcggacacggccgtgtattactgtgcgaggggcagttactatgatagtagtggttatgtggactactggggccagggaaccctggtcaccgtctcctcag

SEQ ID NO: 11698 - DNA, 367 bp, Homo sapiens
caggtgcagctgcaggagtcgggcccaggactggtgaagccttcggagaccctgtccctcacctgcactgtctctggtggctccgtcagcagtggtagttactactggagctggatccggcagcccccagggaagggactggagtggattgggtatatctattacagtgggagcaccaactacaacccctccctcaagagtcgagtcaccatatcagtagacacgtccaagaaccagttctccctgaagctgagctctgtgaccgctgcggacacggccgtgtattactgtgcgagagccgcacgggtagctgctattggatggttcgacccctggggccagggaaccctggtcaccgtctcctcag

SEQ ID NO: 11699 - DNA, 361 bp, Homo sapiens
gaggtgcagctggtgcagtctggagcagaggtgaaaaagccgggggagtctctgaagatctcctgtaagggttctggatacagctttaccagctactggatcggctgggtgcgccagatgcccgggaaaggcctggagtggatggggatcatctatcctggtgactctgataccagatacagcccgtccttccaaggccaggtcaccatctcagccgacaagtccatcagcaccgcctacctgcagtggagcagcctgaaggcctcggacaccgccatgtattactgtgcgagattccccagtggctactacaactggttcgacccctggggccagggaaccctggtcaccgtctcctcag

SEQ ID NO: 11700 - DNA, 364 bp, Homo sapiens
caggtgcagctggtggagtctgggggaggcgtggtccagcctgggaggtccctgagactctcctgtgcagcgtctggattcaccttcagtagctatggcatgcactgggtccgccaggctccaggcaaggggctggagtgggtggcagttatatggtatgatggaagtaataaatactatgcagactccgtgaagggccgattcaccatctccagagacaattccaagaacacgctgtatctgcaaatgaacagcctgagagccgaggacacggctgtgtattactgtgcgaggggtccgggtatagcagcaggggaatacttccagcactggggccagggcaccctggtcaccgtctcctcag

SEQ ID NO: 11701 - DNA, 361 bp, Homo sapiens
caggtgcagctgcaggagtcgggcccaggactggtgaagccttcggagaccctgtccctcacctgcactgtctctggtggctccatcagtagttactactggagctggatccggcagcccccagggaagggactggagtggattgggtatatctattacagtgggagcaccaactacaacccctccctcaagagtcgagtcaccatatcagtagacacgtccaagaaccagttctccctgaagctgagctctgtgaccgccgcagacacggccgtgtattactgtgcgagattacgatattttgactggtaccagatcgttgactactggggccagggaaccctggtcaccgtctcctcag

SEQ ID NO: 11702 - DNA, 361 bp, Homo sapiens
caggtgcagctgcaggagtcgggcccaggactggtgaagccttcggagaccctgtccctcacctgcactgtctctggtggctccatcagtaattactactggagctggctccggcagccccccgggaagggactggagtacattgggtatatctattacagtgggaccaccaactacaacccctccctcaagagtcgagtcaccatatcagtagacacgtccaagaaccagttctccctgaagctgagctctgtgaccgccgcagacacggccgtgtattactgtgcgagacatacgatgggtagacgggagggggattttgactactggggccagggaaccctggtcaccgtctcctcag

SEQ ID NO: 11703 - DNA, 361 bp, Homo sapiens
caggtgcagctgcaggagtcgggcccaggactgatgaagccttcggagaccctgtccctcacctgcactgtctctggtggctccatcagtaattattattggagttggatccggcagacctcagggaagggcctggagtggattgggtacatctattccagtgggatcaccaactacaacccctccctcaagagtcgagtcaccatatccatagacacgtccaagaaccagttctccctgaatttgaactctgtgaccgctgcggacacggccgtgtattactgtgcgagaacttccgagtatagcagtacgtcggggtttgactactggggccagggaaccctggtcaccgtctcctcag

SEQ ID NO: 11704 - DNA, 361 bp, Homo sapiens
caggtgcagctacagcagtggggcgcaggactgttgaagccttcggagaccctgtccctcacctgcactgtctctggtggctccatcagtggttactactggagctggatccggcagtccccagggaagggactggaatggattgggaatatcgcttacagtgggagcaccaactccaacccctccctcaagagtcgagtcaccatgtcagtagacacgtccaagaaccagttctccctgaagctgagctctgtgaccgccgcagacacggccgtctattactgtgcgagatattattgtactaccgcctgctatcatcttgactattggggccggggagccctggtcaccgtctcctcag

SEQ ID NO: 11705 - DNA, 361 bp, Homo sapiens
caggtgcagctgcaggagtcgggcccaggactggtgaagccttcggagaccctgtcccttacctgcactgtctctggtggctccatgagtagctactactggagctggatccggcagcccccagggaaggaactggagtggattgggtatatttataacagtgaaagtaccaggtacaacccctccctcaagagtcgagtcaccatatcagtagacacgtccaagaaccagttctccctgaagctgagctctgtgaccgctgcggacacggccgtgtattactgtgcgagagtcaggggtgggagttactacttgccctttgagttctggggccagggaaccctggtcaccgtctcctcag

SEQ ID NO: 11706 - DNA, 363 bp, Homo sapiens
caggtgcagctggtggagtctgggggaggcgtggtccagcctgggaggtccctgagactctcctgtgcagcctctggattcaccttcagtagctatgctatgcactgggtccgccaggctccaggcaaggggctagagtgggtggcagttatatcatatgatggaagtaataaatactacgcagactccgtgaagggccgattcaccatctccagagacaattccaagaacacgctgtatctgcaaatgaacagcctgagagctgaggacacggctgtgtattactgtgcgagagatggtagcagccgggggtactacggtatggacgtctggggccaagggaccacggtcaccgtctcctca

SEQ ID NO: 11707 - DNA, 363 bp, Homo sapiens
caggtgcagctggtggagtctgggggaggcgtggtccagcctgggaggtccctgagactctcctgtgcagcctctggattcatcttcagcacctatgctatgcactgggtccgccaggctccaggcaaggggctagagtgggtggtagttatatcatatgatggagataataaatactacgcagactccgtgaagggccgattcaccatctccagagacaattccaagaacacgctgtatctgcaaatgaacagcctgagagctgaggacacggctatgtattactgtgcgagagggtatgcggggggctactactacggtatggacgtctggggccaagggaccacggtcaccgtctcctca

SEQ ID NO: 11708 - DNA, 364 bp, Homo sapiens
gaggtgcagctggtgcagtctggagcagaggtgaaaaagcccggggagtctctgaagatctcctgtaagggttctggatacagttttaccagctactggatcggctgggtgcgccagatgcccgggaaaggcctggagtggatggggatcatctatcctggtgactctgataccagatacagcccgtccttccaaggccaggtcaccatctcagccgacaagtccatcagcaccgcctacctgcagtggagcagcctgaaggcctcggacaccgccatgtattactgtgcgagacacagtggctggaataagtacaactggttcgacccctggggccagggaaccctggtcaccgtctcctcag

SEQ ID NO: 11709 - DNA, 358 bp, Homo sapiens
cagctgcagctgcaggagtcgggcccaggactggtgaagccttcggagaccctgtccctcacctgcactgtctctggtggctccatcagcagtagtagttactactggggctggatccgccagcccccagggaaggggctggagtggattgggagtatctattatagtgggagcacctactacaacccgtccctcaagagtcgagtcaccatatccgtagacacgtccaagaaccagttctccctgaagctgagctctgtgaccgccgcagacacggctgtgtattactgtgcgagacagtatagcagtggctggatggactactggggccagggaaccctggtcaccgtctcctcag

SEQ ID NO: 11710 - DNA, 352 bp, Homo sapiens
caggtgcagctgcaggagtcgggcccaggactggtgaagccttcggagaccctgtccctcacctgcactgtctctggtggctccatcagtagttactactggagctggatccggcagcccccagggaagggactggagtggattgggtatatctatttcagtgggagcaccaattacaacccctccctcaagagtcgagtcaccatatcagtagacacgtccaagaaccagttctccctgaagctgagctctgtgaccgctgcggacacggccgtgtattactgtgcgagagatgggggaatgtggttatacgactactggggccagggaaccctagtcaccgtctcctcag

SEQ ID NO: 11711 - DNA, 355 bp, Homo sapiens
gaggtgcagctgttggagtctgggggaggcttggtacagcctggggggtccctgagactctcctgtgcagcctctggattcacctttagcagctatgccatgagctgggtccgccaggctccagggaaggggctggagtgggtctcagctattagtggtagtggtggtagcacatactacgcagactccgtgaagggccggttcaccatctccagagacaattccaagaacacgctgtatctgcaaatgaacagcctgagagccgaggacacggccgtatattactgtgcgaaagattcccggagagatggcctcgactactggggccagggaaccctggtcaccgtctcctcag

SEQ ID NO: 11712 - DNA, 355 bp, Homo sapiens
gaggtgcagctggtggagtctgggggaggcttggtacagcctggagggtcccttacactctcctgtgcagcctctggattcaccttcagtagttatgaaatgaactgggtccgccaggcttcagggaaggggctggagtgggtttcatacattagtagtagtggttctaccatttactacgcagactctctgaagggccgattcaccatctccagagacaacgccaagaactcactgtatctgcaaatgaacagcctgagagccgaggacacggctgtttattattgtgcgagagaagggtctaatccgatctttgagtactggggccagggaaccctggtcaccgtctcctcag

SEQ ID NO: 11713 - DNA, 369 bp, Homo sapiens
gaagtgcacttggtggagtctgggggaggcttggtacagcctggcaggtccctgagactctcctgtgcagcctctggattcacctttgagaattatgccatgcactgggtccggcaagctccagggaagggcctggagtgggtctcaggtattagttggaatagtggtagcataggctatgcggactctgtgaagggccgattcaccatctccagagacaacgccaagaactccctgtatctgcaaatgaacagtctgagagctgaggacacggccttgtattactgtgcaaaagatattcgacccgtaggtagatactactacggtatggacgtctggggccaagggaccacggtcaccgtctcctca

SEQ ID NO: 11714 - DNA, 351 bp, Homo sapiens
gaggtgcagctggtggagtctggaggaggcttgatccagcctggggggtccctgagactctcctgtgcagcctctgggttcaccgtcagtagcaactacatgagctgggtccgccaggctccagggaaggggctggagtgggtctcagttatttatagcggtggtagcacatactacgcagactccgtgaagggccgattcaccatctccagagacaattccaagaacacgctgtatcttcaaatgaacagcctgagagccgaggacacggccgtgtattactgtgcgagagacggtagtccttacggtatggacgtctggggccaagggaccacggtcaccgtctcctca

SEQ ID NO: 11715 - DNA, 351 bp, Homo sapiens
gaggtgcagctggtggagtctggaggaggcttgatccagcctggggggtccctgagactctcctgtgcagcctctgggttcaccgtcagtagcaactacatgagctgggtccgccaggctccagggaaggggctggagtgggtctcagttatttatagcggtggtagcacatactacgcagactccgtgaagggccgattcaccatctccagagacaattccaagaacacgctgtatcttcaaatgaacagcctgagagccgaggacacggccgtgtattactgtgcgagactttataccgggtacggtatggacgtctggggccaagggaccacggtcaccgtctcctca

SEQ ID NO: 11716 - DNA, 338 bp, Homo sapiens
gaggtgcacctggtggagtccgggggaggcttagttcagcctggggggtccctgagactctcctgtgcagcctctggattcagcctcactagttactggatgcactgggtccgccaacctccagggaaggggctggcgtgggtctcacttattagtaatgatgggagtagaacaaattacgcggactccgtgaagggccgattcaccatctccagagacaacgccaagaacacgctgtatctgcaaatgaacagtctgagagccgaggacacggctgtgtattattgtgtaaagagtgaagcttactgcggccagggaaccctggtcaccgtctcctc

SEQ ID NO: 11717 - DNA, 382 bp, Homo sapiens
caggtgcagctggtggagtctgggggaggcttggtcaagcctggagggtctctgagactctcctgtgcagcctctggattcaccttcagtgactactacatgagttggatccgccaggctccagggaaggggctggagtgggtttcatacattagtagtagtggaagtagcatattctactcagactctgtgaagggccgattcaccatctccagggacaacgccaagaactcactgtatctgcaaatgaacagcctgagagccgaggacacggccgtgtattactgtgcgagagatcacgagattaattactatgatggtagtgtttattacgaggggtctcggtactggggccagggaaccctggtcaccgtctcgtcag

SEQ ID NO: 11718 - DNA, 382 bp, Homo sapiens
caggtgcagctggtggagtctgggggaggcgtggtccagcctgggaggtccctgagactctcctgtgcagcgtctggattcaccttcagtagctatggcatgcactgggtccgccaggctccaggcaaggggctggagtgggtggcagttatatggtatgatggaagtaataaatactatgcagactccgtgaagggccgattcaccatctccagagacaattccaagaacacgctgtatctgcaaatgaacagcctgagagccgaggacacggctgtgtattactgtgcgagagacagactaggatattgtagtagtaccagctgctatggggctactttggtctactggggccagggaaccctggtcaccgtctcctcag

SEQ ID NO: 11719 - DNA, 379 bp, Homo sapiens
cagctgcagctgcaggagtcgggcccaggactggtgaagccttcggagaccctgtccctcacctgcactgtctctggtggctccatcagtagttactactggagctggatccggcagcccccagggaagggactggagtggattgggtatatctattacagtgggagcaccaactacaacccctccctcaagagtcgagtcaccatatcagtagacacgtccaagaaccagttctccctgaagctgagctctgtgaccgccgcagacacggctgtgtattactgtgcgagacacaagtattacgatattttgagtggtgattatttccagtactactttgactactggggccagggaaccctggtcaccgtctcctcag

SEQ ID NO: 11720 - DNA, 351 bp, Homo sapiens
caggtgcagctgcaggagtcgggcccaggactggtgaagccttcggagaccctgtccctcacctgcactgtctctggtggctccatcagtagttactactggagctggatccggcagcccgccgggaagggactggagtggattgggcgtatctataccagtgggagcaccaactacaacccctccctcaagagtcgagtcaccatgtcagtagacacgtccaagaaccagttctccctgaagctgagctctgtgaccgccgcggacacggccgtgtattactgtgcgagagagtatagcagctacggtatggacgtctggggccaagggaccacggtcaccgtctcctca

SEQ ID NO: 11721 - DNA, 385 bp, Homo sapiens
caggtgcagctgcaggagtcgggcccaggactggtgaagccttcacagaccctgtccctcacctgcactgtctctggtggctccatcagcagtggtggttactactggagctggatccgccagcacccagggaagggcctggagtggattgggtacatctattacagtgggagcacctactacaacccgtccctcaagagtcgagttaccatatcagtagacacgtctaagaaccagttctccctgaagctgagctctgtgactgccgcggacacggccgtgtattactgtgcgagaagtcccggtgtctttgggcaggtggtttcgtcatcccgagctttctttgactactggggccagggaaccctggtcaccgtctcctcag

SEQ ID NO: 11722 - DNA, 385 bp, Homo sapiens
caggtgcagctgcaggagtcgggcccaggactggtgaagccttcggagaccctgtccctcacctgcactgtctctggtggctccgtcagcagtggtaattactactggagttggatccggcagcccccagggaagggactggaatggattgggtatatctattacagtgggagcaccaactacaacccctccctcaagagtcgagtcaccatatcagtagacacgtccaagaaccagttctccctgaaggtgaggtctgtgaccgctgcggacacggccgtgtattactgtgcgagagaaacgtattactatgatcgtactggttattaccaatctgatgcttttgatatctggggccaagggacaatggtcaccgtctcttcag

SEQ ID NO: 11723 - DNA, 382 bp, Homo sapiens
caggtgcagctggtggagtctgggggaggcttggtcaagcctggagggtccctgagactctcctgtgcagcctctggattcaccttcagtgactactacatgagctggatccgccaggctccagggaaggggctggagtgggtttcatacattagtagtagtggtagtaccatatactacgcagactctgtgaagggccgattcaccatctccagggacaacgccaagaactcactgtatctgcaaatgaacagcctgagagccgaggacacggccgtgtattactgtgcgagagaacccagctattctactatgatagtagtggtaccctttggtgcttttgatatctggggccaagggacaatggtcaccgtctcttcag

SEQ ID NO: 11724 - DNA, 381 bp, Homo sapiens
gaggtgcagctgttggagtctgggggaggcttggtacagcctggggggtccctgagactctcctgtgcagcctctggattcacctttagcagctatgccatgagctgggtccgccaggctccagggaaggggctggagtgggtctcagctattagtggtagtggtggtagcacatactacgcagactccgtgaagggccggttcaccatctccagagacaattccaagaacacgctgtatctgcaaatgaacagcctgagagccgaggacacggccgtatattactgtgcgttacgggggggaaggtacgatttttggagtggtgattactactacggtatggacgtctggggccaagggaccacggtcaccgtctcctca

SEQ ID NO: 11725 - DNA, 381 bp, Homo sapiens
gaggtgcagctgttggagtctgggggaggcttggtacagcctggggggtccctgagactctcctgtgcagcctctggattcacctttagcagctatgccatgagctgggtccgccaggctccagggaaggggctggagtgggtctcagctattagtggtagtggtggtagcacatactacgcagactccgtgaagggccggttcaccatctccagagacaattccaagaacacgctgtatctgcaaatgaacagcctgagagccgaggacacggccgtatattactgtgcgaaagtggtaggaggcgtttggagtggttatctacccaccgatgacggtatggacgtctggggccaagggaccacggtcaccgtctcctca

SEQ ID NO: 11726 - DNA, 381 bp, Homo sapiens
gaggtgcagctggtggagtctgggggaggcctggtcaagcctggggggtccctgagactctcctgtgcagcctctggattcaccttcagtagctatagcatgaactgggtccgccaggctccagggaaggggctggagtgggtctcatccattagtagtagtagtagttacatatactacgcagactcagtgaagggccgattcaccatctccagagacaacgccaagaactcactgtatctgcaaatgaacagcctgagagccgaggacacggctgtgtattactgtgcgagagattactatggttcggggagttatctggactactactactacggtatggacgtctggggccaagggaccacggtcaccgtctcctca

SEQ ID NO: 11727 - DNA, 381 bp, Homo sapiens
gaggtgcagctggtggagtctgggggaggcctggtcaagcctggggggtccctgagactctcctgtgcagcctctggattcaccttcagtagctatagcatgaactgggtccgccaggctccagggaaggggctggagtgggtctcatccattagtagtagtagtagttacatatactacgcagactcagtgaagggccgattcaccatctccagagacaacgccaagaactcactgtatctgcaaatgaacagcctgagagccgaggacacggctgtgtattactgtgcgcgaaaccaaccctcgtggtggctgtctccgcgggactactactacggtatggacgtctggggccaagggaccacggtcaccgtctcctca

SEQ ID NO: 11728 - DNA, 369 bp, Homo sapiens
caggtgcagctggtggagtctgggggaggcgtggtccagcctgggaggtccctgagactctcctgtgcagcctctggattcaccttcagtagctatgctatgcactgggtccgccaggctccaggcaaggggctagagtgggtggcagttatatcatatgatggaagtaataaatactacgcagactccgtgaagggccgattcaccatctccagagacaattccaagaacacgctgtatctgcaaatgaacagcctgagagctgaggacacggctgtgtattactgtgcgagaggacacggtgactacggctactactactacggtatggacgtctggggccaagggaccacggtcaccgtctcctca

SEQ ID NO: 11729 - DNA, 373 bp, Homo sapiens
gaagtgcagctggtggagtctgggggaggcttggtacagcctggcaggtccctgagactctcctgtgcagcctctggattcacctttgatgattatgccatgcactgggtccggcaagctccagggaagggcctggagtgggtctcaggtattagttggaatagtggtagcataggctatgcggactctgtgaagggccgattcaccatctccagagacaacgccaagaactccctgtatctgcaaatgaacagtctgagagctgaggacacggccttgtattactgtgcaaaagggaggcagtggctccagtccctaagctacaactggttcgacccctggggccagggaaccctggtcaccgtctcctcag

SEQ ID NO: 11730 - DNA, 375 bp, Homo sapiens
cagctgcagctgcaggagtcgggcccaggactggtgaagccttcggagaccctgtccctcacctgcagtgtctctggtggctccatcagcagtagtagttaccactgggcctggatccgccagcccccagggaaggggctggagtggattgggagtatctattatagtgggagcacctactacaacccgtccctcaagagtcgagtcaccatatccgtagacacgtccaagaaccagttctccctgaagctgagctctgtgaccgccgcagacacggctgtgtattactgtgcgggccctactcttatcgtgggggctactaactactacggtatggacgtctggggccaagggaccacggtcaccgtctcctca

SEQ ID NO: 11731 - DNA, 372 bp, Homo sapiens
gaggtgcagctggtggagtctgggggaggcttggtccagcctggggggtccctgagactctcctgtgcagcctctggattcacctttagtagctattggatgagctgggtccgccaggctccagggaaggggctggagtgggtggccaacataaagcaagatggaagtgagaaatactatgtggactctgtgaagggccgattcaccatctccagagacaacgccaagaactcactgtatctgcaaatgaacagcctgagagccgaggacacggctgtgtattactgtgcgagaggaggcagtggctggccgcactactactactacggtatggacgtctggggccaagggaccacggtcaccgtctcctca

SEQ ID NO: 11732 - DNA, 370 bp, Homo sapiens
caggtgcagctacagcagtggggcgcaggactgttgaagccttcggagaccctgtccctcacctgcgctgtctatggtgggtccttcagtggttactactggagctggatccgccagcccccagggaaggggctggagtggattggggaaatcaatcatagtggaagcaccaactacaacccgtccctcaagagtcgagtcaccatatcagtagacacgtccaagaaccagttctccctgaagctgagctctgtgaccgccgcggacacggctgtgtattactgtgcgagaggccccttttggagtggttattataccggtcgctggttcgacccctggggccagggaaccctggtcaccgtctcctcag

SEQ ID NO: 11733 - DNA, 372 bp, Homo sapiens
gaggtgcagctggtggagtctgggggaggcttggtacagcctggagggtccctgagactctcctgtgcagcctctggattcaccttcagtagttatgaaatgaactgggtccgccaggctccagggaaggggctggagtgggtttcatacattagtagtagtggtagtaccatatactacgcagactctgtgaagggccgattcaccatctccagagacaacgccaagaactcactgtatctgcaaatgaacagcctgagagccgaggacacggctgtttattactgtgcgagagttggggcaggggcgagttactactactactacggtatggacgtctggggccaagggaccacggtcaccgtctcctca

SEQ ID NO: 11734 - DNA, 373 bp, Homo sapiens
caggtgcagctggtgcagtctggggctgaggtgaagaagcctggggcctcagtgaaggtctcctgcaaggcttctggatacaccttcaccggctactatatgcactgggtgcgacaggcccctggacaagggcttgagtggatgggatggatcaaccctaacagtggtcgcacaaactatgcacagaagtttcagggcagggtcaccatgaccagggacacgtccatcagcacagcctacatggagctgagcaggctgagagctgacgacacggccgtgtattactgtgcgagagagggggagatgttagcagtgtctggtaccgggacatttgactactggggccagggaaccctggtcaccgtctcctcag

SEQ ID NO: 11735 - DNA, 373 bp, Homo sapiens
caggttcagctggtgcagtctggagctgaggtgaagaagcctggggcctcagtgaaggtctcctgcaaggcttctggttacacctttaccagctatggtatcagctgggtgcgacaggcccctggacaagggcttgagtggatgggatggatcagcgcttacaatggtaacacaaactatgcacagaagctccagggcagagtcaccatgaccacagacacatccacgagcacagcctacatggagctgaggagcctgagatctgacgacacggccgtgtattactgtgcgagagtgcccgactcctattactatgatagtagtggttattacttaaactggggccagggaaccctggtcaccgtctcctcag

SEQ ID NO: 11736 - DNA, 370 bp, Homo sapiens
caggtgcagctgcaggagtcgggcccaggactggtgaagccttcggagaccctgtcgctcacttgcgctgtctctggtgactccatcaggagttactactggagctggatccggcagcccccagggaagggactggagtggatgggacatatctataacagtgggagcaccacctacaacccctccctcaagagtcgagtcaccatatcattagcaacgtccaagacccagttctccctgatcctgacctctgtgaccgctgcggacacggccgtgtattactgtgcgggaggccctccatattgtggtgctgactgctccgggtacttccagcactggggccagggcaccctggtcaccgtctcctcag

SEQ ID NO: 11737 - DNA, 373 bp, Homo sapiens
caggtgcagctggtggagtctgggggaggcgtggtccagcctgggaggtccctgagactctcctgtgcagcctctggattcaccttcagtagctatggcatgcactgggtccgccaggctccaggcaaggggctggagtgggtggcagttatatcatatgatggaagtaataaatactatgcagactccgtgaagggccgattcaccatctccagagacaattccaagaacacgctgtatctgcaaatgaacagcctgagagctgaggacacggctgtgtattactgtgcgaaagatagtttacctaggccctggttattaggccactactttgactactggggccagggaaccctggtcaccgtctcctcag

SEQ ID NO: 11738 - DNA, 373 bp, Homo sapiens
caggtgcagctggtggagtctgggggaggcgtggtccagcctgggaggtccctgagactctcctgtgcagcctctggattcaccttcagtagctatgctatgcactgggtccgccaggctccaggcaaggggctagagtgggtggcagttatatcatatgatggaaataataaatatcacgcagactccgtgaagggccgattcaccatctccagagacaattccaagaacacgctgtatctgcaaatgaacagcctgagagctgaggacacggctgtgtattactgtgcgagagattttgatgactacggtggtaactccggggagtattttgactactggggccagggaaccctggtcaccgtctcctcag

SEQ ID NO: 11739 - DNA, 358 bp, Homo sapiens
caggtgcagctggtggagtctgggggaggcgtggtccagcctgggaggtccctgagactctcctgtgcagcctctggattcaccttcagtagctatgctatgcactgggtccgccaggctccaggcaaggggctagagtgggtggcagttatatcatatgatggaagtaataaatactacgcagactccgtgaagggccgattcaccatctccagagacaattccaagaacacgctgtatctgcaaatgaacagcctgagaactgaggacacggctgtgtattactgtgcgagagatcctaggggatactcctactttgactactggggccagggaaccctggtcaccgtctcctcag

SEQ ID NO: 11740 - DNA, 370 bp, Homo sapiens
gaggtgcagctggtggagtctgggggaggcttggtacagcctggggggtccctgagactctcctgtgcagcctctggattcaccttcagtcgctataacatgaactgggtccgccaggctccagggaaggggctggagtgggtttcatacattagtacttatagtactaccatctactacgcagactctgtgaagggccgatttaccatctccagagacaatgcccagaactcactgtatctgcaaatgaacagcctgagagacgacgacacggctgtgtattactgtgcgagagagggtatcgaaaacaccccggggggatatgcttttgatatctggggccaagggacaatggtcaccgtctcctcag

SEQ ID NO: 11741 - DNA, 358 bp, Homo sapiens
caggtgcagctggtgcagtctggggctgaggtgaagaagcctggggcctcagtgaaggtctcctgcaaggcttctggatacaccttcaccggctactatatgcactgggtgcgacaggcccctggacaagggcttgagtggatgggatggatcaaccctaacagtggtggcacaaactatgcacagaagtttcagggcagggtcaccatgaccagggacacgtccatcagcacagcctacatggagctgagcaggctgagatctgacgacacggccgtgtattactgtgcgagggattacgatttttggagtggttacccctactggggccagggaaccctggtcaccgtctcctcag

SEQ ID NO: 11742 - DNA, 361 bp, Homo sapiens
cagctgcagctgcaggagtcgggcccaggactggtgcagccttcggagaccctgtccctcacctgctctgtctctggtggctccatcagtagtgttccttactacgggggctggatccgccagcccccagggaagggcctcgagtacattgggagtatttattatggtgggagcacctactacaacccgtccctcaagagtcgagtcaccatattcgtagacacatccaagaaccaattctccctgaaactgacctctgtgaccgccgcagacacggctgtttattactgtgcgagactcagtggtgactccggagcttttgaccactggggccagggaaccctggtcaccgtctcctcag

SEQ ID NO: 11743 - DNA, 355 bp, Homo sapiens
cagctgcagctgcaggagtcgggcccaggactggtgaagccttcggagaccctgtccctcacctgcactgtctctggtggctccatcagcagttactcctggggctggattcgccagcccccagggaaggggctggagtggattgggagtttctattatagtgggaccacctactacaacccgtccctcaagagtcgagtcaccatatccgtagacacgtccaagaaccagttctccctgaagctgagctctgtgaccgccgcagacacggctgtctattactgtgcgagaaggggcagtgactggaactactttgactactggggccagggaaccctggtcaccgtctcctcag

SEQ ID NO: 11744 - DNA, 361 bp, Homo sapiens
cagctgcagctgcaggagtcgggcccaggactggtgaagccttcggagaccctgtccctcacctgcactgtctctggtggctccatcagcagtagtagttactactggggctggatccgccagcccccagggaaggggctggagtggattgggagtatctattatagtgggagcacctactacaacccgtccctcaagagtcgagtcaccatatccgtagacacgtccaagaaccagttctccctgaagctgagctctgtgaccgccgcagacacggctgtgtattactgtgcgagacataattacgatattttgacccttgatatctggggccaagggacaatggtcaccgtctcttcag

SEQ ID NO: 11745 - DNA, 354 bp, Homo sapiens
gaggtgcggctggtggagtctggcggaggcttgatccagcctggggggtccctgagactctcctgtgcagcctctgggttcaccgtcagtagcaactacatgagctgggtccgccaggctccagggaaggggctggagtgggtctcagttatttatagcggtggtagcacattctacgcagactccgtgaagggccgattcaccatctccagagacaattccaagaacacgctgtatcttcaaatgaacagcctgagagccgaggacacggccgtttattactgtgcgagaggtccgatgggactctacggtatggacgtctggggccaagggaccacggtcaccgtctcctca

SEQ ID NO: 11746 - DNA, 388 bp, Homo sapiens
caggtccagctggtacagtctggggctgaggtgaagaagcctggggcctcagtgaaggtctcctgcaaggcttctggttacacctttaccagctatggtatcagctgggtgcgacaggcccctggacaagggcttgagtggatgggatggatcagcgcttacaatggtaacacaaactatgcacagaagctccagggcagagtcaccatgaccacagacacatccacgagcacagcctacatggagctgaggagcctgagatctgacgacacggccgtgtattactgtgcgagtatacacaaagattgttacgatttttggagtggttaccctaggggttgctggttcgacccctggggccagggaaccctggtcaccgtctcctcag

SEQ ID NO: 11747 - DNA, 355 bp, Homo sapiens
gaggtgcagctggtggagtctgggggaggcttggtacaacctggagggtccctgagactctcctgtgcagcctctggattcagcgtcagtaattctgaaatgaactgggtccgccaggctccagggaaggggctggagtgggtttcataccttagtcctagtggtaccatttaccacgcagactctgtgaagggccgattcaccatctccagagacaacgccaagaactcactgtttctgcaaatgaacagcctgagaaccgaggacacggctatttattactgtgcgagagaggacaatggctcgccgtgggttgagtactggggccagggaaccctggtcagtgtctcctcag

SEQ ID NO: 11748 - DNA, 358 bp, Homo sapiens
gaggtgcagctggtggagtctgggggaggcttggtacagcctggagggtccctgagactctcctgtgcagcctctggattcaccttcagtagttatgaaatgaactgggtccgccaggctccagggaaggggctggagtgggtttcatacattagtagtagtggtagtaccatatactacgcagactctgtgaagggccgattcaccatctccagagacaacgccaagaactcactgtatctgcaaatgaacagcctgagagccgaggacacggctgtttattactgtgcgagagatctcatagtgggagctacgaaagactactggggccagggaaccctggtcaccgtctcctcag

SEQ ID NO: 11749 - DNA, 384 bp, Homo sapiens
caggtgcagctacagcagtggggcgcaggactgttgaagccttcggagaccctgtccctcacctgcgctgtctatggtgggtccttcagtggttactactggagctggatccgccagcccccagggaaggggctggagtggattggggaaatcaatcatagtggaagcaccaactacaacccgtccctcaagagtcgagtcaccatatcagtagacacgtccaagaaccagttctccctgaagctgagctctgtgaccgccgcggacacggctgtgtattactgtgcgagaggactttatgattacgtttgggggagttatcgttacgggtactactacggtatggacgtctggggccaagggaccacggtcaccgtctcctca

SEQ ID NO: 11750 - DNA, 387 bp, Homo sapiens
caggtgcagctggtggagtctgggggaggcgtggtccagcctgggaggtccctgagactctcctgtgcagcctctggattcaccttcagtagctatggcatgcactgggtccgccaggctccaggcaaggggctggagtgggtggcagttatatcatatgatggaagtaataaatactatgcagactccgtgaagggccgattcaccatctccagagacaattccaagaacacgctgtatctgcaaatgaacagcctgagagctgaggacacggctgtgtattactgtgcgaaagactcctactatggttcggggagtttttacaacgtgccctactactacggtatggacgtctggggccaagggaccacggtcgccgtctcctca

SEQ ID NO: 11751 - DNA, 387 bp, Homo sapiens; identical to SEQ ID NO: 9916

SEQ ID NO: 11752 - DNA, 364 bp, Homo sapiens
caggtgcagctggtggagtctgggggaggcgtggtccagcctgggaggtccctgagactctcctgtgcagcctctggattcaccttcagtagctatggcatgcactgggtccgccaggctccaggcaaggggctggagtgggtggcagttatatcatatgatggaagtaataaatactatgcagactccgtgaagggccgattcaccatctccagagacaattccaagaacacgctgtatctgcaaatgaacagcctgagagctgaggacacggctgtgtattactgtgcgaaaggacggcagtgggagctactatggaactttgactactggggccagggaaccctggtcaccgtctcctcag

SEQ ID NO: 11753 - DNA, 364 bp, Homo sapiens
caggtgcagctggtggagtctgggggaggcgtggtccagcctgggaggtccctgagactctcctgtgcagcctctggattcaccttcagtagtaatggcatgcactgggtccgccaggctccaggcaaggggctggagtgggtggcagttatatcatatgatggaagtaataaatactatgcagactccgtgaagggccgattcaccatctccagagacaattccaagaacacgctgtttctgcaaatgaacagcctcagagctgaggacacggctgtgtattactgtgcgacggaggtagtggtgatagctgctactccgattgactactggggccagggaaccctggtcaccgtctcctcag

SEQ ID NO: 11754 - DNA, 364 bp, Homo sapiens
caggtgcagctggtggagtctgggggaggcgtggtccagcctgggaggtccctgagactctcctgtgcagcctctggattcaccttcagtagctatggcatgcactgggtccgccaggctccaggcaaggggctggagtgggtggcagttatatcatatgatggaagcaataaattctatgcagactccgtgaagggccgattcatcatctccagagacaattccaagaacacgctgtatctgcaaatgaacagcctgagagctgaggacacggctgtgtatttctgtgcgacatcgactagtggttattacttctccccccccggctactggggccagggaaccctggtcaccgtctcctcag

SEQ ID NO: 11755 - DNA, 363 bp, Homo sapiens
aggtgcaactggaggagtctgggggaggcttggtccagcggggggggtccctgagactctcctgtgcagcctctggattcaccttcagtagctatggcatgcactgggtccgccaggctccaggcaaggggctggactgggtggcaattatatcatatgatggaagtaataaatactacgcagactccgtgaagggccgattcaccatctccagagacaattccaagaacacgctgtatttggaagtgagcagcctgagaactgaggacacggctgtgtattactgtgcaagaactaacaatgggaactacaacggctactttgactactggggccagggaaccctggtcaccgtctcctcag

SEQ ID NO: 11756 - DNA, 364 bp, Homo sapiens
caggtgcagctggtggagtctgggggaggcgtggtccagcctgggaggtccctgagactctcctgtgcagcctctggattcaccttcagtagctatgctatgcactgggtccgccaggctccaggcaaggggctagagtgggtggcagttatatcatatgatggaaataataaatactacgcagactccgtgaggggccgattcaccatctccagagacaattccaagaacacgctttatctgcaaatgaacagcctgagagctgaggacacggctgtgtattactgtgcgagagctaactatggtggctactccagtccacttgactactggggccagggaaccctggtcaccatctcctcag

SEQ ID NO: 11757 - DNA, 387 bp, Homo sapiens
gaggtgcagctggtggagtctgggggaggcctggtcaagcctggggggtccctgagactctcctgtgcagcctctggattcaccttcagtagctatagcatgaactgggtccgccaggctccagggaaggggctggagtgggtctcatccattagtagtagtagtagttacatatactacgcagactcagtgaagggccgattcaccatctccagagacaacgccaagaactcactgtatctgcaaatgaacagcctgagagccgaggacacggctgtgtattactgtgcgagaggtgcgacccatgactacagtaactacaactattactactactactacggtatggacgtctggggccaagggaccacggtcaccgtctcctca

SEQ ID NO: 11758 - DNA, 384 bp, Homo sapiens
gaggtgcagctggtggagtctgggggaggcctggtcaagcctggggggtccctgagactctcctgtgcagcctctggattcatcttcagtaattatagaatgaactgggtccgccaggctccagggaaggggctggagtgggtctcatgcattgatagtagtggtagttacacatattatgtggactcagtgaagggccgattcaccatctccagagacaccgccaagaactcactgtatctgcaaatgaacagcctgagagccgaggacacggctgtgtattactgtgcgagagattttcccccggttcagagactggttatcggtcgggcagggtacggtttggacgtctggggccaagggatcacggtcaccgtctcctca

SEQ ID NO: 11759 - DNA, 384 bp, Homo sapiens
gaggtgcagctggtggagtctgggggaggcttggtccagcctggggggtccctgagactctcctgtgcagcctctggattcacctttagtagctattggatgagctgggtccgccaggctccagggaaggggctggagtgggtggccaacataaagcaagatggaagtgagaaatactatgtggactctgtgaagggccgattcaccatctccagagacaacgccaagaactcactgtatctgcaaatgaacagcctgagagccgaggacacggctgtgtattactgtgcgagagatctcgcagaccccagcagctggtacagttactactactactacggtatggacgtctggggccaagggaccacggtcaccgtctcctca

SEQ ID NO: 11760 - DNA, 399 bp, Homo sapiens
caggtgcagctggtgcagtctggggctgaggtgaagaagcctggggcctcagtgaaggtctcctgcaaggcttctggatacaccttcaccgacttctttatgcactgggtgcgacaggcccctggacaagggcttgagtggataggatggatcagccctaacagtggtggcacaaactatgcacagaagtttcagggcagggtcaccatgaccagggacacgtccatcaccacagcctacatggagctgagcaggctgagatctgacgacacggccgtgtattactgtgcgagaactgccctgcttccccgggatattgtagtggtggtagctggtatggactactactactacggtatggacgtctggggccaagggaccacggtcaccgtctcctca

SEQ ID NO: 11761 - DNA, 396 bp, Homo sapiens
caggtgcagctgcaggagtcgggcccaggactggtgaagccttcggagaccctgtccctcacctgcactgtctctggtggctccatcagtagttactactggagctggatccggcagcccccagggaagggactggagtggattgggtatatctattacagtgggagcaccaactacaacccctccctcaagagtcgagtcaccatatcagtagacacgtccaagaaccagttctccctgaagctgagctctgtgaccgccgcagacacggccgtgtattactgtgcgagacacagtctcggtggctacgatttgttagtagagatggctacaatcaaagggtactactacggtatggacgtctggggccaagggaccacggtcaccgtctcctca

SEQ ID NO: 11762 - DNA, 391 bp, Homo sapiens
caggtgcagctggtgcagtctggggctgaggtgaagaagcctggggcctcagtgaaggtctcctgcaaggcttctggatacaccttcaccagttatgatatcaactgggtgcgacaggccactggacaagggcttgagtggatgggatggatgaaccctaacagtggtaacacaggctatgcacagaagttccagggcagagtcaccatgaccaggaacacctccataagcacagcctacatggagctgagcagcctgagatctgaggacacggccgtgtattactgtgcgagaggccccctcccttatgattacgtttgggggagttatcgatacgggggggcctggtttgactactggggccagggaaccctggtcaccgtctcctcag

SEQ ID NO: 11763 - DNA, 202 bp, Homo sapiens
ggaaaagggttggggcggatgcactccctggtgcaacttagcccagctcagctcagctcagctcaacccagttcaactcagcccagttcagctcaactcagcccagttcagccttgtttagtctaggtcagcttaggtcagttttgcccatctgagtccatttctgaaagctggttggagttgtcatggccagaaatggtca

SEQ ID NO: 11764 - DNA, 402 bp, Homo sapiens
gaagtgcagctggtggagtctgggggaggcttggtacagcctggcaggtccctgagactctcctgtgcagcctctggattcacctttgatgattatgccatgcactgggtccggcaagctccagggaagggcctggagtgggtctcaggtattagttggaatagtggtagcataggctatgcggactctgtgaagggccgattcaccatctccagagacaacgccaagaactccctgtatctgcaaatgaacagtctgagagctgaggacacggccttgtattactgtgcaaaagattgggcgttcgggagatactatggttcggggagttattacccccgggtgggctactactacggtatggacgtctggggccaagggaccacggtcaccgtctcctca

SEQ ID NO: 11765 - DNA, 337 bp, Homo sapiens
caggtccagctggtacagtctggggctgaggtgaagaagcctggggcctcagtgaaggtctcctgcaaggtttccggatacaccctcactgaattatccatgcactgggtgcgacaggctcctggaaaagggcttgagtggatgggaggttttgatcctgaagatggtgaaacaatctacgcacagaagttccagggcagagtcaccatgaccgaggacacatctacagacacagcctacatggagctgagcagcctgagatctgaggacacggccgtgtattactgtgcaacagatggaatctggggccagggaaccctggtcaccgtctcctcag

SEQ ID NO: 11766 - DNA, 349 bp, Homo sapiens
caggtgcagctgcaggagtcgggcccaggactggtgaagccttcggagaccctgtccctcacctgcactgtctctggtggctccatcagtagttacttctggagctgggtccggcagcccccagggaagggactggagtggattgggtatgtctattacagtgggagcaccaactgcaacccctccctcaagagtcgagtcaccttttcagtagacacctccaagaaccagttctccctgaggctgacttctgtgaccgctgcggacacggccgtgtattactgtgcgagagactacggtgggaaacttgactactggggccagggaaccctggtcaccgtctcctcag

SEQ ID NO: 11767 - DNA, 370 bp, Homo sapiens
caggtgcagctgcaggagtcgggcccaggcctggtgaagccttcgaagaccctgtccctcacctgcactgtctctggtggctccatcagcagttactactggagttggctccggcagcccccagggaagggactggagtggattgggtatatctattacactgggagcaccaactacaacccctccctcaagagtcgagtcaccctatcactagacacgtccaagaaccagttctccctgaacctgagctctgtgaccgccgcagacacggccatgtattactgtgcgagactctattactatggttcggggagttattataaccgattcgacccctggggccagggaaccctggtcaccgtctcctcag

SEQ ID NO: 11768 - DNA, 393 bp, Homo sapiens
caggtgcagctgcaggagtcgggcccaggactggtgaagccttcggagaccctgtccctcacctgcactgtctctggtggctccatcagtagttactactggagctggatccggcagcccccagggaagggactggagtggattgggtatatctattacagtgggagcaccaactacaacccctccctcaagagtcgagtcaccatatcagtagacacgtccaagaaccagttctccctgaagctgagctctgtgaccgccgcagacacggccgtgtattactgtgcgaccactcgtcccctaggatattgtagtggtggtagctgcttaccatactactactactacggtatggacgtctggggccaagggaccacggtcaccgtctcctca

SEQ ID NO: 11769 - DNA, 358 bp, Homo sapiens
gaggtgcagctggtgcagtctggagcagaggtgaaaaagcccggggagtctctgaagatctcctgtaagggttctggatacagctttaccagctactggatcggctgggtgcgccagatgcccgggaaaggcctggagtggatggggatcatctatcctggtgactctgataccagatacagcccgtccttccaaggccaggtcaccatctcagccgacaagtccatcagcaccgcctacctgcagtggagcagcctgaaggcctcggacaccgccatgtattactgtgcgagacggtcttactatgactactactttgactactggggccagggaaccctggtcaccgtctcctcag

SEQ ID NO: 11770 - DNA, 382 bp, Homo sapiens
gaggtgcagctgttggagtctgggggaggcttggtacagcctggggggtccctgagactctcctgtgcagcctctggattcacctttagcagctatgccatgagctgggtccgccaggctccagggaaggggctggagtgggtctcagttatttatagcggtggtagcacatactacgcagactccgtgaagggccgattcaccatctccagagacaacgccaagaactcactgtatctgcaaatgaacagcctgagagccgaggacacggctgtttattactgtgcgagagaccgaacccagtattactatgatagtagtggttattaccgtgatgcttttgatatctggggccaagggacaatggtcaccgtctcttcag

SEQ ID NO: 11771 - DNA, 325 bp, Homo sapiens
gaaattgtgttgacgcagtctccaggcaccctgtctttgtctccaggggaaagagccaccctctcctgcagggccagtcagggtgttagcgccagccgcttagcctggtaccagcagaagcctggccaggctcccaggctcctcatgtatggtgtatccaacagggccactggcatcccagacaggttcagtggcagtgggtttgggacagacttcactctcaccatcagcagactggagcctgaagattttgcagtgtattactgtcagcagtatgatgggtcactgtacacttttggccaggggaccaacctggagatcaaac

SEQ ID NO: 11772 - DNA, 325 bp, Homo sapiens
gaaattgtgttgacgcagtctccaggcaccctgtctttgtctccaggggaaagagccaccctctcctgcaggcccagtcagagtgttaccaacaactacttagcctggtaccagcagaaacctggccaggctcccaggctcctcatctatggtgtattcagcagggccaccggcatcccagacaggttcagtggcagtgggtctgggacagacttcactctcaccatcagcagactggagcctgaagattttgcagtgtattactgtcagcagtatggtagctcactgtacacttttggccaggggaccaaggtggagatcaaac

SEQ ID NO: 11773 - DNA, 325 bp, Homo sapiens
gaaattgtgttgacgcagtctccaggcaccctgtctttgtctccaggggaaagagccaccctctcctgcagggccagtcagagtgttaacagcatctacttagcctggtaccagcagaaacctggccaggctcccaggctcctcatctatggtgcatccagcagggccactggcatcccagacaggttcagtggcagtgggtctgggacagacttcactctcaccatcagcagactggagcctgaagattttgcagtgtattactgtcagcagtatggtagctcactgtacacttttggccaggggaccaggctggaagtcaaac

SEQ ID NO: 11774 - DNA, 325 bp, Homo sapiens
gaaattgtgttgacgcagtctccaggcaccctgtctttgtctccaggggaaagagccaccctctcctgcagggccattcagagtgttcccagcagctacttagcctggtaccagcagaaacctggccagtctcccaggctcctcatctatggtgcatccagcagggccactggcatcccagacaggttcagtggcagtgggtctgggacagacttcactctcaccatcagcagactggagcctgaagattttgcagtgtattactgtcagcagtatggtagctcactgtacacctttggccaggggaccaagctggagatcaaac

SEQ ID NO: 11775 - DNA, 325 bp, Homo sapiens
gaaattgtgttgacgcagtctccaggcaccctgtctttgtctccaggggaaagagccaccctctcctgcagggccagtcagagtgttagcagcagctacttagcctggtaccagcagaaacctggccaggctcccaggctcctcatctatggtgtatccagcagggccactggcatcccagacaggttcagtggcagtgggtctgggacagacttcactctcaccatcagcagactggagcctgaagattttgcagtgtattactgtcagcagtacggtaactcactgtacacttttggccaggggaccaagctggagatcaaac

SEQ ID NO: 11776 - DNA, 335 bp, Homo sapiens
tattgtgatgactcagtctccaccctccctgcccgtcacccctggagagacggcctccatctcctgcaggtctagtcagagcctcctgcataggagtggatacaactatttggattggtacctgcagaagccagggcagtctccacagctcctgatctatttgggttctaatcgggcctccggggtccctgacaggttcagtggcagtggatccggcacagattttacactgaaaatcagcagagtggaggctgaggatgttggggtttattactgtatgcaaggtctacagactccactcactttcggcggtgggaccaaggtggagatcaaac

SEQ ID NO: 11777 - DNA, 335 bp, Homo sapiens
tattgtgatgactcagtctccaccgtccctgcccgtcacccctggagagccggcctccatctcctgcaggtctagtcagagcctcctgcatagtagtggatacaactatttggattggtacctgcagaagccagggcagtctccacaactcctgatctatttgggttctaatcgggcctccggggtccctgacaggttcagtggcagtggatcaggcacagattttacactgaaaataagcagagtggaggctgaggatgttggggtttattactgcatgcaaggtctacaaactccactcactttcggcggagggaccaaggtggagatcaaac

SEQ ID NO: 11778 - DNA, 322 bp, Homo sapiens
tcctatgagctgacacagccaccctcggtgtcactgtccccaggacaaacggccaggatcacctgctctggagatgcattgacaaaaaattatgcttattggtaccagcagaagtcaggccaggcccctgtgctggtcatctatgaggaccgcaaacgaccctccgggatccctacgagattctctggctccacctcagggacaatggccaccttgactatcagtggggcccaggtagacgatgaagctgactactactgttactcaacagacagcagtgctaatcgggggttcggcggagggaccaagttgaccgtcctag

SEQ ID NO: 11779 - DNA, 331 bp, Homo sapiens
cagactgtggtgacccaggagccatcgctctcagtgtcccctggagggacagtcacactcacttgtggcttgagctctggctcagtctctactaattactaccccaactggtaccagcagaccccaggccaggctccacgcacgctcatctacaacacaaacactcgcttttctggggtccctgatcgcttctctggctccatccttgggaacaaagctgccctcaccatcacgggggcccaggcagatgatgaatctgattattactgtctgctgtatatgcgtagtggctattgggtgttcggcggagggaccaagctgaccgtcctag

SEQ ID NO: 11780 - DNA, 327 bp, Homo sapiens
cagtctgccctgactcagcctgcctccgtgtctgggtctcttggacagtcgatcaccatctcctgcactggaaccagcagtgacgttggtggttataactatgtctcctggtaccaacagcacccaggcaaagcccccaaatttatcatttatgaggtcagtcatcggccctcaggggtttctaatcgcttctctggctccaagtctggcaacacggcctccctgaccatctctgggctccaggctgaggacgaggctgattattactgcagctcatattcaagcagcagcactctcttcggaactgggaccaaggtcaccgtccta

SEQ ID NO: 11781 - DNA, 327 bp, Homo sapiens; identical to SEQ ID NO: 11780

SEQ ID NO: 11782 - DNA, 340 bp, Homo sapiens
gacatcgtgatgacccagtctccagactccctggctgtgtctctgggcgagagggccaccatcaactgcaagtccagccagagtgttttatacagttccaacaataagaactacttagcttggtaccagcagaaagcaggacagcctcctaagctgctcatttactgggcatctacccgggaatccggggtccctgaccgattcagtggcagcgggtctgggacagatttcactctcaccatcagcagcctgcaggctgaagatgtggcagtttattactgtcagcaatattatagtcttccgctcactttcggcggagggaccaaggtggagatcaaac

SEQ ID NO: 11783 - DNA, 340 bp, Homo sapiens; identical to SEQ ID NO: 11782

SEQ ID NO: 11784 - DNA, 328 bp, Homo sapiens
gaaattgtgttgacgcagtctccaggcaccctgtctttgtctccaggggaaagagccaccctctcctgcagggccagtcagagtgttagcagcagctacttagcctggtaccagcagaaacctggccaggctcccaggctcctcatctatggtgcatccagcagggccactggcatctcagacaggttcagtggcagtgggtctgggacagacttcactctcaccatcagcagactggagcctgaagattttgcagtgtattactgtcagcagtatggtagctctccaatgtacacttttggccaggggaccaagctggagatcaaac

SEQ ID NO: 11785 - DNA, 328 bp, Homo sapiens
gaaattgtgttgacgcagtctccaggcaccctgtctttgtctccaggggaaagagccaccctctcctgcagggccagtcagagtgttagcaacaactacttagcctggtaccagcagaaacctggccaggctcccaggctcctcatctatggtgcatccagcagggccactggcatcccagacaggttcagtggcagtgggtctgggacagacttcactctcaccatcagcagactggagcctgaggattttgcagtgtattactgtcagcagtatggtacctctccaatgtacacttttggccaggggagcaagctggagatcaaac

SEQ ID NO: 11786 - DNA, 322 bp, Homo sapiens
gacatagagatgacgcagtctccagccaccctgtctgtgtctccaggggaaagagcctctctctcctgcagggccagtcagagtcttaacagcaacttagcctggtaccagcagaaacctgggcaggctcccaggctcctcatctatcgtgcatccaccagggccactggtgtcccagccaggttcagtggcagtgggtctgcgacagagttcactctcatcatcagcagcctgcagtctgaagattttgcagtttattactgtcagcaatataatagctggcccctcactttcggcggagggaccaaggtggacatcaaac

SEQ ID NO: 11787 - DNA, 322 bp, Homo sapiens; identical to SEQ ID NO: 11786

SEQ ID NO: 11788 - DNA, 337 bp, Homo sapiens
cagcttgtactgactcaatcgccctctgcctctgcctccctgggagcctcggtcaagctcacctgcactctgagcagtgggcacagcagctacgccatcgcttggcatcagcagcagccagagaagggccctcggtacttgatgaagcttaatagcgatggcagccacaccaagggggacgggatccctgatcgcttctcaggctccagctctgggactgagcgctacctcaccatctccagcctccagtctgaggatgaggctgactattactgtcagacctggggcactggcattcatgtggtatttggcggagggaccaagctgaccgtcctag

SEQ ID NO: 11789 - DNA, 337 bp, Homo sapiens
cagcttgtactgactcaatcgccctctgcctctgcctccctgggagcctcggtcaagctcacctgcactctgagcagtgggcacagtagctacgccatcgcttggcatcagcagcagccagagaagggccctcggtacttgatgaagcttaatagcgatggcagccacaccaagggggacgggatccctgatcgcttctcaggctccagctctgggactgagcgctacctcaccatctccagcctccagtctgaggatgaggctgactattactgtcagacctggggcactggcattcatgtggtatttggcggagggaccaagctgaccgtcctag

SEQ ID NO: 11790 - DNA, 322 bp, Homo sapiens; identical to SEQ ID NO: 2453

SEQ ID NO: 11791 - DNA, 322 bp, Homo sapiens; identical to SEQ ID NO: 2453

SEQ ID NO: 11792 - DNA, 322 bp, Homo sapiens
gacatccagatgacccagtctccatcctccctgtctgcatctgtaggagacagagtcaccatcacttgccgggcaagtcagagcattagcagctatttaaattggtatcagcagaaaccagggaaagcccctaagctcctgatctatgctgcatccagtttgcaaagtggggtcccatcaaggttcagtggcagtggatctgggacagatttcactctcaccatcagcagtctgcaacctgaagattttgcaacttactactgtcaacagagttacagtacccctagaacgttcggccaagggaccaaggtggaaatcaaac

SEQ ID NO: 11793 - DNA, 337 bp, Homo sapiens
gatattgtgatgactcagtctccactctccctgcccgtcacccctggagagccggcctccatctcctgcaggtctagtcagagcctcctgcatagtagtggatacaactatttgaattggtacctgcagaagccagggcagtctccacaggtactgatctatttggcttctaatcgggcctccggggtccctgacaggttcagtggcagtggatcagccacagattttacactgaaaatcagcagagtggaggctgaggatgttgggctttattactgcatgcaaactctacaaaccccgtggacgttcggccaagggaccaaggtggaaatcaaac

SEQ ID NO: 11794 - DNA, 331 bp, Homo sapiens
cagtctgtgttgacgcagccgccctcagtgtctgcggccccaggacagaaggtctccatttcctgctctggaggcagctccaacattggaaataagtatgtgtcgtggtaccagcaactcccaggaacagcccccaaactcctcatttatgacaattataagcgaccctcagggattcctgaccgattctctggctccaagtctggcacgtcagccaccctggacatcaccggagtccagaccggggacgaggccgattattactgcggagcatgggataccagcctgagtgctggggttttcggcggagggaccaagttgaccgtcctag

SEQ ID NO: 11795 - DNA, 325 bp, Homo sapiens
gacatccagatgacccagtctccatcctccctgtctgcatctgtaggagacagagtcaccatcacttgccgggcaagtcagagcattagcagctatttaaattggtatcagcagaaaccagggaaagcccctaagctcctgatctatgctgcatccagtttgcaaagtggggtcccatcaaggttcagtggcagtggatctgggacagatttcactctcaccatcagcagtctgcaacctgaagattttgcaacttactactgtcaacagagttacagtacccctcagttcactttcggcggagggaccaaggtggagatcaaac

SEQ ID NO: 11796 - DNA, 340 bp, Homo sapiens
gacatcgtgatgacccagtctccagactccctggctatgtctctgggcgagagggccaccatcaactgcaagtccagccagcctgttttatccagctccaacaataagaactacttagcttggtaccagcagaaatcaggacagcctcctaagctactcatttactgggcatctactcgggaatccggggtccctgaccgattcagtggcagcgggtctgggacagatttcactctcaccatcagcagcctgcaggctgaagatgtggcagtttattactgtcagcaatcttataggactcctctcactttcggcggagggaccaaggtggagatcaaac

SEQ ID NO: 11797 - DNA, 314 bp, Homo sapiens
gacatccagatgacccagtctccatcctccctgtctgcatctgtaggagacagagtcaccatcacttgccgggcgagtcagggcattagcaattgtttagcctggtatcagcagaaaccagggaaagttcctaagctcctgatctatgctgcatccactttgcaattaggggtcccatctcggttcagtggcagtggatctgggacagatttcactctcaccatcagcagcctgcagcctgaggatgttgcaacttattactgtcaaaagtattttcttcactttcggccctgggaccaaagtggatatcaaac

SEQ ID NO: 11798 - DNA, 325 bp, Homo sapiens
gaaattgtgttgacgcagtctccaggcaccctgtctttgtctccaggggaaagagctaccctctcctgcagggccagtcagagtgttagcagcacctacttagcctggtatcagcagaaacctggccaggctcccaggctcctcatctatggtgcatccaccagggccactggcatcccagacaggttcagtggcagtgggtctgggacagacttcactctcaccatcagcagactggagcctgaagattttgcagtgtattactgtcagcagtatggtagctcacttctcactttcggcggagggaccaaggtggagatcaaac

SEQ ID NO: 11799 - DNA, 328 bp, Homo sapiens
cagtctgtgctgactcagccaccctcagcgtctgggacccccgggcagagggtcaccatctcttgttctggaagcagctccaacatcggaagtaatactgtaaactggtaccagcagctcccaggaacggcccccaaactcctcatctatagtaataatcagcggccctcaggggttcctgaccgattctctggctccaagtctggcacctcagcctccctggccatcagtgggctccagtctgaggatgaggctgattattactgtgcagcatgggatgacagcctgaatggagtgttcggcggagggaccaagctgaccgtcctag

SEQ ID NO: 11800 - DNA, 322 bp, Homo sapiens
gaaattgtgttgacacagtctccagccaccctgtctttgtctccaggggaaagagccaccctctcctgcagggccagtcagagtgttagcagctacttagcctggtaccaacagaaacctggccaggctcccaggctcctcatctatgatgcatccaacagggccactggcatcccagccaggttcagtggcagtgggtctgggacagacttcactctcaccatcagcagcctagagcctgaagattttgcagtttattactgtcagcagcgtagcaactggcctcgaaccttcggccaagggacacgactggagattaaac

SEQ ID NO: 11801 - DNA, 310 bp, Homo sapiens
tcctatgagctgacacagccaccctcggtgtcagtgtccccaggacagacggccaggatcacctgctctggagatgcattgccaaagcaaaatgcttattggtaccagcagaagccaggccaggcccctgtacagtgagagggcctcagggatccctgagcgattctctggctccagctcagggacaacagtcacgttgaccatcagtggtgtctgggcagaagacgaggctgactattactgtcaatcagcagacagcagtggtacttatccggagtgttcggcggagggaccacgctgaccgtcctag

SEQ ID NO: 11802 - DNA, 319 bp, Homo sapiens; identical to SEQ ID NO: 7651

SEQ ID NO: 11803 - DNA, 337 bp, Homo sapiens
cagtctgtgttgacgcagccgccctcagtgtctgcggccccaggacagaaggtcaccatctcctgctctggaaccagctccaacattgggaataattatgtttcctggtaccagcagctcccaggaacagcccccaaactcctcatttatgacaataataagcgaccctcagggattcctgaccgattctctggctccaagtctggcacgtcagccaccctgggcatcaccggactccagactggggacgaggccgattattactgcggaacatgggatagcagcctgagtgctggcccttgggtgttcggcggagggaccaagctgaccgtcctag

SEQ ID NO: 11804 - DNA, 322 bp, Homo sapiens
tcctatgagctgactcagccaccctcagtgtccgtgtccccaggacagacagccagcatcacctgctctggagataaattgggggataaatatgcttgctggtatcagcagaagccaggccagtcccctgtgctggtcatctatcaagatagcaagcggccctcagggatccctgagcgattctctggctccaactctgggaacacagccactctgaccatcagcgggacccaggctatggatgaggctgactattactgtcaggcgtgggacagcagcactgctggggtcttcggaactgggaccaaggtcaccgtcctag

SEQ ID NO: 11805 - DNA, 340 bp, Homo sapiens
gacatcgtgatgacccagtctccagactccctggcagtgtctctgggcgagagggccaccatcaactgcaaatccagccagagtgttttatacacctcttacaataagaactacttagcttggtaccagcagaaggcaggacagcctcctaagttgctcatttactgggcatctacccgggaatccggggtccctgaccgattcagcggcagcgggtctgggacagatttcactctcaccatcagcagcctgcaggctgaagatgtggcggtttattactgtcagcaatattatagaactcccctcactttcggcggagggaccaaggtggagatcaaac

SEQ ID NO: 11806 - DNA, 322 bp, Homo sapiens
gacatccagatgacccagtctccatcctccctgtctgcatctgtaggagacagagtcaccatcacttgccgggcaagtcagagcattagcagctatttaaattggtatcagcagaaaccagggaaagcccctaagctcctgatctatgctgcatccagtttgcaaagtggggtcccatcaaggttcagtggcagtggatctgggacagatttcactctcaccatcagcagtctgcaacctgaagattttgcaacttactactgtcaacagagttacagtacccctctcactttcggccctgggaccaaagtggatatcaaac

SEQ ID NO: 11807 - DNA, 343 bp, Homo sapiens
gacatcgtgatgacccagtctccagactccctggctgtgtctctgggcgagagggccaccatcaactgcaagtccagccagagtgttttatacagctccaacaataagaactacctagcttggtaccagcagaaaccaggacagcctcctaagctgctcatttactgggcatctacccgggaatccggggtccctgaccgattcagtggcagcgggtctgggacagatttcactctcaccatcagcagcctgcaggctgaagatgtggcagtttattactgtcagcaatattatagtactcctctgctcactttcggccctgggaccaaagtggatatcaaac

SEQ ID NO: 11808 - DNA, 325 bp, Homo sapiens
gaaattgtgttgacgcagtctccaggcaccctgtctttgtctccaggggaaagagccaccctctcctgcagggccagtcagagtgttagcagcagctacttagcctggtaccagcagaaacctggccaggctcccaggctcctcatctatggtgcatccagcagggccactggcatcccagacaggttcagtggcagtgggtctgggacagacttcactctcaccatcagcagactggagcctgaagattttgcagtgtattactgtcagcagtatggtagctctccattcgctttcggccctgggaccaaagtggatatcaaac

SEQ ID NO: 11809 - DNA, 331 bp, Homo sapiens
cagtctgccctgactcagcctccctccgcgtccgggtctcctggacagtcagtcaccatctcctgcactggaaccagcagtgacgttggtggttataactatgtctcctggtaccaacagcacccaggcaaagcccccaaactcatgatttatgaggtcagtaagcggccctcaggggtccctgatcgcttctctggctccaagtctggcaacacggcctccctgacaatctctggactccaggctgaggacgaggctgattattactgctgctcatatgcaggtagtagcacttgggtgttcggcggagggaccaagctgaccgtcctag

SEQ ID NO: 11810 - DNA, 325 bp, Homo sapiens
gacatccagttgacccagtctccatccttcctgtctgcatctgtaggagacagagtcaccatcacttgccgggccagtcagggcattagcagttatttagcctggtatcagcaaaaaccagggaaagcccctaagctcctgatctatgctgcatccactttgcaaagtggggtcccatcaaggttcagcggcagtggatctgggacagaattcactctcacaatcagcagcctgcagcctgaagattttgcaacttattactgtcaacagcttaatagttacccccccctcactttcggccctgggaccaaagtggatatcaaac

SEQ ID NO: 11811 - DNA, 340 bp, Homo sapiens
gacatcgtgatgacccagtctccagactccctggctgtgtctctgggcgagagggccaccatcgactgcaagtccagccagagtattttctacagctccaacaataagaactacttagcttggtaccagcagaaaccaggacagcctcctaagctgctcatttactgggcatctacccgggaatccggggtccctgaccgattcagtggcagcgggtctgggacagatttcactctcaccatcagcagcctgcaggctgaagatgtggcagtttattactgtcagcaatattatagtactccgctcactttcggcggagggaccaaggtggagatcaaac

SEQ ID NO: 11812 - DNA, 325 bp, Homo sapiens
gacatccagatgacccagtctccttccaccctgtctgcatctgtaggagacagagtcaccatcacttgccgggccagtcagagtattagtagctggttggcctggtatcagcagaaaccagggaaagcccctaagctcctgatctataaggcgtctagtttagaaagtggggtcccatcaaggttcagcggcagtggatctgggacagaattcactctcaccatcagcagcctgcagcctgatgattttgcaacttattactgccaacagtataatagttattctctgtacacttttggccaggggaccaagctggagatcaaac

SEQ ID NO: 11813 - DNA, 322 bp, Homo sapiens
gacatccagatgacccagtctccatcctccctgtctgcatctgtaggagacagagtcaccatcacttgccgggcgagtcagggcattagcaattatttagcctggtatcagcagaaaccagggaaagttcctaagctcctgatctatgctgcatccactttgcaatcaggggtctcatctcggttcagtggcagtggatctgggacagatttcactctcaccatcagcagcctgcagcctgaagatgttgcaacttattactgtcaaaagtataacagtgcccctctgacgttcggccaagggaccaaggtggaaatcaaac

SEQ ID NO: 11814 - DNA, 325 bp, Homo sapiens
gaaattgtgttgacgcagtctccaggcaccctgtctttgtctccaggggaaagagccaccctctcctgcagggccagtcagagtgttagcagcagctacttagcctggtaccagcagaaacctggccaggctcccaggctcctcatctatggtgcatccagcagggccactggcatcccagacaggttcagtggcagtgggtctgggacagacttcactctcaccatcagcagactggagcctgaagattttgcagtgtattactgtcagcagtatggtagctcattgctcactttcggcggagggaccaaggtggagatcaaac

SEQ ID NO: 11815 - DNA, 322 bp, Homo sapiens; identical to SEQ ID NO: 851

SEQ ID NO: 11816 - DNA, 322 bp, Homo sapiens; identical to SEQ ID NO: 3870

SEQ ID NO: 11817 - DNA, 322 bp, Homo sapiens; identical to SEQ ID NO: 837

SEQ ID NO: 11818 - DNA, 316 bp, Homo sapiens
tcctatgagctgactcagccactctcagtgtcagtggccctgggacagacggccaggattacctgtggtggaaacaacattggaagtaaaaatgtgcactggtaccagcagaagccaggccaggcccctgtgctggtcatctatagggatagcaaccggccctctgggatccctgagcgattctctggctccaactcggggaacacggccaccctgaccatcagcagagcccaagccggggatgaggctgactattactgtcaggtgtgggacagcagccctctattcggcggagggaccaagttgaccgtcctag

SEQ ID NO: 11819 - DNA, 322 bp, Homo sapiens
gccatccggatgacccagtctccatcctcattctctgcatctacaggagacagagtcaccatcacttgtcgggcgagtcagggtattagcagttatttagcctggtatcagcaaaaaccagggaaagcccctaagctcctgatctatgctgcatccactttgcaaagtggggtcccatcaaggttcagcggcagtggatctgggacagatttcactctcaccatcagctgcctgcagtctgaagattttgcaacttattactgtcaacagtattatagttacccgcggacgttcggccaagggaccaaggtggaaatcaaac

SEQ ID NO: 11820 - DNA, 334 bp, Homo sapiens
cagtctgtgctgacgcagccgccctcagtgtctggggccccagggcagagggtcaccatctcctgcactgggagcagctccaatatcggggcaggttatgatgtacactggtaccagcaccttccaggaacagcccccaaactcctcatctatggtaataccaatcggccctcaggggtccctgaccgattctctggctccaagtctggcacctcagcctccctggccatcactgggctccaggctgaggatgaggctgattattactgccagtcatatgacagcagcctgagtgccttggtgttcggcggagggaccaagctgaccgtcctag

SEQ ID NO: 11821 - DNA, 340 bp, Homo sapiens
gacatcgtgatgacccagtctccagactccctggctgtgtctctgggcgagagggccaccatcaactgcaagtccagccagagtgttttagacagctccaacaataagaactacttaggttggtaccagcagaaaccaggacagcctcctaagctgctcatttactgggcatctacgcgggaatccggggtccctgaccgattcagtggcagcgggtctgggacagatttcactctcaccatcagcagcctgcaggctgcagatgtggcagtttattactgtcagcaatattatattagtccgctcactttcggcggagggaccaaggtggagatcaaac

SEQ ID NO: 11822 - DNA, 334 bp, Homo sapiens
cagtctgtgctgacgcagccgccctcagtgtctggggccccagggcagagggtcaccatctcctgcactgggagcagctccaacatcggggcaggttatgatgtacactggtaccagcagcttccaggaacagcccccaaactcctcatctatggcaacagtaatcggccctcaggggtccctgaccgattctctggctccaagtctggcccctcagcctccctggccatcactgggctccaggctgaggatgaggctgattattactgccagtcctatgacagcagcctgagtggttgggtgttcggcggagggaccaagctgaccgtcctag

SEQ ID NO: 11823 - DNA, 325 bp, Homo sapiens
gaaattgtgttgacgcagtctccaggcaccctgtctttgtctccaggggagagagccaccctctcctgcagggccagtcagagtgttagcaacaactacgtaggctggtatcagcagaaacctggccaggctcccaggctcctcatctatggtgcatccaatagggccactggcatcccagacaggttcagtggcagtgggtctgggacagacttcactctcaccatcagcagactggagcctgaagattttgcagtgtattactgtcagcagtatggtatctcacctcagacgttcggccaagggaccaaggtggaaatcaaac

SEQ ID NO: 11824 - DNA, 331 bp, Homo sapiens
cagtctgccctgactcagcctgcctccgtgtctgggtctcctggacagtcgatcaccatctcctgcactggaaccagcagtgacgttgctaattataactatgtctcctggtaccaacaccacccaggcaaagcccccaaactcatgatttatgaggtcagtaatcggccctcagggatttctaatcgcttctctggctccaagtctggcaacacggcctccctgaccatctctgggctccaggctgaggacgaggctgattattactgcagctcatatacaaccagcagcacttgggtgttcggcgaagggaccaaactgaccgtcctag

SEQ ID NO: 11825 - DNA, 337 bp, Homo sapiens
gatattgtgatgactcagtctccactctccctgcccgtcacccctggagagccggcctccatctcctgcaggtctagtcagagcctcctgcatagtaatggatacaactatttggattggtacctgcagaagccagggcagtctccacagctcctgatctatttgggttctaatcgggcctccggggtccctgacaggttcagtggcagtggatcaggcacagattttacactgaaaatcagcagagtggaggctgaggatgttggggtttattactgcatgcaagctctacaaactctattcactttcggccctgggaccaaagtggatatcaaac

SEQ ID NO: 11826 - DNA, 331 bp, Homo sapiens
cagtctgtgttgacgcagccgccctcagtgtctgcggccccaggacagaaggtcaccatctcctgctctggaagcagctccaacattgggaataattatgtatcctggtaccagcagttcccaggaacagcccccaaactcctcatttatgacaataataagcgaccctcagggattcctgaccgattctctggctccaagtctggcacgtcagccaccctgggcatcaccggactccagactggggacgaggccgattattactgcggaacatgggatagcagcctgagtgctggagtgttcggcggagggaccaagctgaccgtcctag

SEQ ID NO: 11827 - DNA, 331 bp, Homo sapiens
cagtctgccctgactcagcctgcctccgtgtctgggtctcctggacagtcgatcaccatctcctgcactggaaccagcagtgacgttggtggttataactatgtctcctggtaccaacagcacccaggcaaagcccccaaactcatgatttatgaggtcagtaatcggccctcaggggtttctaatcgcttctctggctccaagtctggcaacacggcctccctgaccatctctgggctccaggctgaggacgaggctgattattactgcagctcatatacaagcagcagcactctcttattcggcggagggaccaagctgaccgtcctag

SEQ ID NO: 11828 - DNA, 322 bp, Homo sapiens
gacatccagctgacccagtctccatcctcactgtctgcatctgtaggagacagagtcaccatcacttgtcgggcgagtcaggacattagcaattatttagcctggtttcagcagaaaccagggaaagcccctaagtccctgatctatgctgcatccagtttgcaaagtggggtcccatcaaagttcagcggcagtggatctgggacagatttcactctcaccatcagcagcctgcagcctgaagattttgcaacttattactgccaacagtataatagttaccctcgaacttttggccaggggaccaagctggacatcaaac

SEQ ID NO: 11829 - DNA, 322 bp, Homo sapiens
gaaatagtgatgacgcagtctccagccaccctgtctgtgtctccaggggaaagagccaccctctcctgcagggccagtcagagtgttagcagcaacttagcctggtaccagcagaaacctgggcaggctcccaggctcctcatctatggtgcatccaccagggccactggtatcccagccaggttcagtggcagtgggtctgggacagagttcactctcaccatcagcagcctgcagtctgaagattttgcagtttattactgtcagcagtataataactggcctttcaccttcggccaagggacacgactggagattaaac

SEQ ID NO: 11830 - DNA, 331 bp, Homo sapiens
cagactgtggtgacccaggagccatcgttctcagtgtcccctggagggacagtcacactcacttgtggcttgagctctggctcagtctctactagtttctaccccagctggtaccagcagaccccaggccaggctccacgcacgctcatctacaccacatacactcgctcttctggggtccctgatcgcttctctggctccatccttgggaacaaagctgccctcaccatcacgggggcccaggcagatgatgaatctgattattactgtctgctctatatgagtagtggcatttcggtgttcggcggagggaccaagctgaccgtcctag

SEQ ID NO: 11831 - DNA, 331 bp, Homo sapiens
aattttatgctgactcagccccactctgtgtcggagtctccggggaagacggtaaccatctcctgcacccgcagcagtggcagcattgccagcaactatgtgcagtggtaccagcagcgcccgggcagtgcccccaccactgtgatctatgaggataaccaaagaccctctggggtccctgatcggttctctggctccatcgacagctcctccaactctgcctccctcaccatctctggactgaagactgaggacgaggctgactactactgtcagtcttatgatagcagcagctgggtgttcggcggagggaccaagctgaccgtcctag

SEQ ID NO: 11832 - DNA, 328 bp, Homo sapiens
gaaattgtgttgacgcagtctccaggcaccctgtctttgtctccaggggaaagagccaccctcttctgcagggccagtcagagtgttcccagcagttacttaacctggtaccaacagacacctggccaggctcccaggctcctcatttatggtgcctccaacagggccactggcatcccagacaggttcagtggcagtgggtctgggacagacttcactctcaccatcagcagactggagcctgaagattttgcagtgtattactgtcagcagtatggtacctcatctccgctcactttcggcggcgggaccaaggtggagatcaaac

SEQ ID NO: 11833 - DNA, 325 bp, Homo sapiens
tcctatgagctgactcagccactctcagtgtcagtggccctgggacagacggccaggattacctgtgggggaaacaacattggaagtaaaaatgtgcactggtaccagcagaagccaggccaggcccctgtgctggtcatctatagggatagcaaccggccctctgggatccctgagcgattctctggctccaactctgggaacacggccaccctgaccatcagcagggtcgaagccggggatgaggccgactattactgtcaggtgtgggatagtactagtgatcatccggtattcggcggagggaccaagctgaccgtcctag

SEQ ID NO: 11834 - DNA, 337 bp, Homo sapiens
gaaattgtgatgacccagagtccactctcctcacctgtcacccttggacagccggcctccatctcctgcaggtctagtcaaagcctcgtccacagtgatggaaacacctacttgagttggcttcagcagaggccaggccagcctccaagactcctaatttataagatttctaaccggttctctggggtcccagacagattcagtggcagtggggcagggacagatttcacactgaaaatcaccagggtggaagctgaggatgtcggggtttattactgcacgcaagctacacaatttccgtggacgttcggccaagggaccaaggtggaaatcaaac

SEQ ID NO: 11835 - DNA, 320 bp, Homo sapiens
gaaattgtgttgacacagtctccagccaccctgtctttgtctccaggggaaagagccaccctctcctgcagggccagtcagagtgttagcgggcacttagcctggtaccaacagaaacctggccaggctcccaggctcctcatctatgatgcatccaacagggccactggcatcccagccaggttcagtggccgtgggtctgggacagacttcactctcaccatcaacagcctagagactgaagattttgcagtttattactgtcagcagcgtaacatctggcctatcaccttcggccttgggacacgactggagattaa

SEQ ID NO: 11836 - DNA, 325 bp, Homo sapiens
tcctttgacctgacacagccaccctcggtgtcggtgtccccaggacaaacggccaggatcacctgctctggagatgctttggcaaaaaagtatgtttattggtaccagcagaagtcaggccaggcccctgtgctggtcgtctctgaggacaccaaacgaccctccgggatccctcagagaatctctggctccagcttagggacaatggccaccttgactatcaatggggcccaggtggaggatgaagctgactactattgttattcaacagacagcagtggtaattattgggtgttcggcggagggaccaagctgaccgtcctag

SEQ ID NO: 11837 - DNA, 325 bp, Homo sapiens
tcctatgagctgacacaaccaccctcggtgtcagtgtccccaggacagacggccaggatcacctgctctggagatgcattgccaaagcaatatgcttactggtatcagcaacagccaggccaggcccctgtgttggtgatatataaagacactgagaggccctcagggatccctgagcgattctctggctccagctcagggacaacagtcacgttgaccatcagtggagtccaaccagaagacgagtctgactattactgtcaatcagcagacagcagtggttcttataaagtgttcggcggagggaccaagctgaccgtcctag

SEQ ID NO: 11838 - DNA, 322 bp, Homo sapiens
gacatccagatgacccagtctccatcctccctgtctgcatctgtaggagacagagtcaccatcacttgccgggcaagtcagagcattagcagctatttaaattggtatcagcagaaaccagggaaagcccctaagctcctgatctctgctgcatctagtttgcaaagtggggtcccatcaaggttcactggcagtggatctgggacagatttcactctcaccatcagcagtctgcaacctgaagattttgcaacttactactgtcaacagagttacagtacccctctgacgttcggccaagggaccaaggttgaaatcaaac

SEQ ID NO: 11839 - DNA, 331 bp, Homo sapiens
cagtctgccctgactcagcctgcctccgtgtctgggtctcctggacagtcgatcaccatctcctgcactggaaccagcagtgacgttggtggttataaatatgtctcctggtaccaacaccacccaggcaaagcccccaaactcatgatttatgaggtcagtaatcggccctcaggggtttctaatcgcttctctggctccaagtctggcaacacggcctccctgaccatctctgggctccaggctgaggacgaggctgattattactgcagctcatatacaagcagcagcactctagtcttcggaactgggaccaaggtcaccgtcctag

SEQ ID NO: 11840 - DNA, 340 bp, Homo sapiens
gacatcgtgatgacccagtctccagactccctggctgtgtctctgggcgagagggccaccatcaactgcaagtccagccagagtgttttatacagctccaacaataagaactacttagcttggtaccagcagaaaccaggacagcctcctaagctgctcatttactgggcatctacccgggaatccggggtccctgaccgattcagtggcagcgggtctgggacagatttcactctcaccatcagcagcctgcaggctgaagatgtggcagtttattactgtcagcaatattatagtactccgtggacgttcggccaagggaccaaggtggaaatcaaac

SEQ ID NO: 11841 - DNA, 316 bp, Homo sapiens
gacatccagttgacccagtctccatcctccctgtctgcatctgtaggagacagagtcaccatcacttgccgggtgagtcagggcattagcagttatttaaattggtatcggcagaaaccagggaaagttcctaagctcctgatctatagtgcatccaatttgcaatctggagtcccatctcggttcagtggcagtggatctgggacagatttcactctcactatcagcagcctgcagcctgaagatgttgcaacttattacggtcaacggacttacaatgccctttttggccaggggaccaagctggagatcaaac

SEQ ID NO: 11842 - DNA, 322 bp, Homo sapiens
gccacccagatgacccagtctccatcctccctgtctgcatctgtaggagacagagtcaccatcacttgccgggcaagtcagggcattagaagtgatttaggctggtatcagcagaaaccagggaaagcccctaagcccctgatccatactgcatccgttttaaaaagtggggtcccatcaaggttcagcggcagtggatctggcacagatttcactctcaccatcagcaacctgcagcctgaagattttgcaacttatttctgtctacaagataacaattacccgtggacgttcggccaagggaccaaggtggaaatcaaac

SEQ ID NO: 11843 - DNA, 325 bp, Homo sapiens
gacatccagatgacccagtctccatcctccctgtctgcatctgtaggagacagagtcaccatcacttgccgggcaagtcagagcattagcagctatttaaattggtatcagcagaaaccagggaaagcccctaagctcctgatctatgctgcatccagtttgcaaagtggggtcccatcaaggttcagtggcagtggatctgggacagatttcactctcaccatcagcagtctgcaacctgaagattttgcaacttactactgtcaacagagttacagtacccctccgttcactttcggccctgggaccaaagtggatatcaaac

SEQ ID NO: 11844 - DNA, 340 bp, Homo sapiens; identical to SEQ ID NO: 2395

SEQ ID NO: 11845 - DNA, 331 bp, Homo sapiens
cagcttgtgctgactcaatcgccctctgcctctgcctccctgggagcctcggtcaagctcacctgcactctgagcagtgggcacagcagctacgccatcgcatggcatcagcagcagccagagaagggccctcggtacttgatgaagcttaacagtgatggcagccacagcaagggggacgggatccctgatcgcttctcaggctccagctctggggctgagcgctacctcaccatctccagcctccagtctgaggatgaggctgactattactgtcagacctggggcactggcgtggtattcggcggagggaccaagctgaccgtcctag

SEQ ID NO: 11846 - DNA, 319 bp, Homo sapiens
gaaattgtgttgacacagtctccagccaccctgtctttgtctccaggggaaagagccaccctctcctgcagggccagtcagagtattagcagctacttagcctggtaccaacagaaacctggccaggctcccaggctcctcatctatgatgcatccaacagggccactggcatcccagccagattcagtggcagtgggtctgggacagacttcactctcaccatcagcagcctagagcctgaagattttgcagtttattactgtcagcagcgtagcaactggctcactttcggcggagggaccaaggtggagatcaaac

SEQ ID NO: 11847 - DNA, 337 bp, Homo sapiens
cagtctgccctgactcagcctgcctccgtgtctgggtctcctggacagtcgatcaccatctcctgcactggaaccagcagtgacgttggtggttataactatgtctcctggtaccaacagcacccaggcaaagcccccaaactcatgatttatgaggtcagtaatcggccctcaggggtttctaatcgcttctctggctccaagtctggcaacacggcctccctgaccatctctgggctccaggctgaggacgaggctgattattactgcagctcatatacaagcagcagcactcttaattgggtgttcggcggagggaccaagctgaccgtcctag

SEQ ID NO: 11848 - DNA, 322 bp, Homo sapiens
gacatccagatgacccagtctccatcctccctgtctgcatctgtaggagacagagtcaccatcacttgccgggcaagtcagagcattagcagctatttaaattggtatcagcagaaaccagggaaagcccctaagctcctgatctatgctgcatccagtttgcaaagtggggtcccatcaaggttcagtggcagtggatctgggacagatttcactctcaccatcagcagtctgcaacctgaagattttgcaacttactactgtcaacagagttacagtaccctcctcactttcggcggagggaccaaggtggagatcaaac

SEQ ID NO: 11849 - DNA, 322 bp, Homo sapiens
gacatccagatgacccagtctccatcttccgtgtctgcatctgtaggagacagagtcaccatcacttgtcgggcgagtcagggtattagcagctggttagcctggtatcagcagaaaccagggaaagcccctaagctcctgatctatgctgcatccagtttgcaaagtggggtcccatcaaggttcagcggcagtggatctgggacagatttcactctcaccatcagcagcctgcagcctgaagattttgcaacttactattgtcaacaggctaacagtttccccctcactttcggcggagggaccaaggtggagatcaaac

SEQ ID NO: 11850 - DNA, 325 bp, Homo sapiens
gaaataatgatgacgcagtctcctgccaccctgtctgtgtctccaggggaaagagccaccctctcctgcagggccagtcagagtgttaacagcaacttagcctggtaccagcagaaacctgggcaggctcccaggctcctcatctatgatgcatccaccagggccactggtatcccagccaggttcagtggcagtgggtctgggacagagttcactctcaccatcagcagcctgcagtctgaagattttgcagtttattactgtcagcagtataataactggcctccggtcaccttcggccaagggacacgactggagattaaac

SEQ ID NO: 11851 - DNA, 325 bp, Homo sapiens
gaaattgtgttgacgcagtctccaggcaccctgtctttgtctccaggagaaagagccaccctctcctgcagggccagtcagagtgttagcagcagctatttagcctggtatcagcagaaacctggccaggctccccggctcctcatctatggtgtatccagcagggccactggcatcccagacaggttcagtggcagtgggtctgggacagacttcactctcaccatcagcagactggagcctgaagatcttgcaatgtattactgtcagacatatgatagctcaatgtacacttttggccaggggaccaagttggagatcaaac

SEQ ID NO: 11852 - DNA, 343 bp, Homo sapiens
gacatcgtgatgacccagtctccagactccctggctgtgtctctgggcgagagggtcaccatcaactgcaagtccagccacagtgttttatacagctccaacaataagaacttcttagcttggtaccagcagaaaccaggacagcctcctaagttgctcatttactgggcatctacccgggaatctggggtccctgaccgattcagtggcagcgggtctgggacagatttcactctcaccatcaacagcctgcaggctgaagatgtggcagtttattactgtcagcaatattatagtactcctccgtacacctttggccaggggaccaagctggagatcaaac

SEQ ID NO: 11853 - DNA, 328 bp, Homo sapiens
cagtctgtgttgacgcagccgccctcagtgtctgcggccccaggacagaaggtcaccatctcctgctctggaagcacctccaacattgggaataattatgtatcctggtaccagcacttcccaggaacagcccccaaactcctcatttatgacaataatgagcgaccctcagggattcctgaccgattctctggctccaagtctggcacgtcagccaccctgggcatcaccggactccagactggggacgaggccgattattactgcggaacatgggatagcagcctgagttatgtcttcggaactgggaccaaggtcaccgtcctag

SEQ ID NO: 11854 - DNA, 337 bp, Homo sapiens
gatgttgtgatgactcagtctccactctccctgcccgtcacccttggacagccggcctccatctcctgcaggtctagtcaaagcctcgtatacagtgatggaaacacctacttgaattggtttcagcagaggccaggccaatctccaaggcgcctaatttataaggtttctaactgggactctggggtcccagacagattcagcggcagtgggtcaggcactgatttcacactgaaaatcagcagggtggaggctgaggatgttggggtttattactgcatgcaaggtacacactggcctcgaacgttcggccaagggaccaaggtggaaatcaaac

SEQ ID NO: 11855 - DNA, 325 bp, Homo sapiens
gaaattgtgttgacgcagtctccaggcaccctgtctttgtctccaggggaaagagccaccctctcctgcagggccagtcagagtgttagcagcagctacttagcctggtaccagcagaaacctggccaggctcccaggctcctcatctatggtgcatccagcagggccactggcatcccagacaggttcagtggcagtgggtctgggacagacttcactctcaccatcagcagactggagcctgaagattttgcagtgtattactgtcagcagtatggtagctcactattcactttcggccctgggaccaaagtggatatcaaac

SEQ ID NO: 11856 - DNA, 316 bp, Homo sapiens
tcctatgagctgactcagccactctcagtgtcagtggccctgggacagacggccaggattacctgtgggggaaacaacattggaagtaaaaatgtgcactggtaccagcagaagccaggccaggcccctgtgctggtcatctatagggatagcaaccggccctctgggatccctgagcgattctctggctccaactcggggaacacggccaccctgaccatcagcagagcccaagccggggatgaggctgactattactgtcaggtgtgggacagcagcacggtattcggcggagggaccaagctgaccgtcctag

SEQ ID NO: 11857 - DNA, 328 bp, Homo sapiens
cagtctgtgctgactcagccaccctcagcgtctgggacccccgggcagagggtcaccatctcttgttctggaagcagctccaacatcggaagtaattatgtatactggtaccagcagctcccaggaacggcccccaaactcctcatctataggaataatcagcggccctcaggggtccctgaccgattctctggctccaagtctggcacctcagcctccctggccatcagtgggctccggtccgaggatgaggctgattattactgtgcagcatgggatgacagcctgagtgccttgttcggcggagggaccaagctgaccgtcctag

SEQ ID NO: 11858 - DNA, 331 bp, Homo sapiens
cagtctgccctgactcagcctgcctccgtgtctgggtctcctggacagtcgatcaccatctcctgcactggaaccagcagtgacgttggtggttataactatgtctcctggtaccaacagcacccaggcaaagcccccaaactcatgatttttgaggtcagtaatcggccctcagggctttctaatcgcttctctggctccaagtctgacaacacggcctccctgaccatctctggtctccaggctgaggacgaggctgattattactgcagctcatatacaagcagcagcactctggtattcggcggagggaccaaggtgaccgtcctag

SEQ ID NO: 11859 - DNA, 322 bp, Homo sapiens; identical to SEQ ID NO: 7913

SEQ ID NO: 11860 - DNA, 322 bp, Homo sapiens
gacatccagatgacccagtctccatcctccctgtctgcatctgtaggagacagagtcaccatcacttgccgggcaagtcagagcattagcagctatttaaattggtatcagcagaaaccagggaaagcccctaagctcctgatctatgctgcatccagtttgcaaagtggggtcccatcaaggttcagtggcagtggatctgggacagatttcactctcaccatcagcagtctgcaacctgaagattttgcaacttactactgtcaacagagttacactaccccgtggacgttcggccaagggaccaaggtggaaatcaaac

SEQ ID NO: 11861 - DNA, 322 bp, Homo sapiens; identical to SEQ ID NO: 1778

SEQ ID NO: 11862 - DNA, 334 bp, Homo sapiens
cagtctgccctgactcagcctgcctccgtgtctgggtctcctggacagtcgatcaccatctcctgcactggaaccagcagtgatgttggtggttataactatgtctcctggtaccaacaacacccaggcaaagcccccaaactcatgatttatgatgtcagtaagtggccctcaggggtttctaatcgcttctctggctccaagtctggcaacacggcctccctgacaatctctgggctccaggctgaggacgaggctgattattactgctgctcatatgcaggtagtaccacttattgggtgttcggcggagggaccaagctgaccgtcctag

SEQ ID NO: 11863 - DNA, 322 bp, Homo sapiens
gacatccagatgacccagtctccatcctccctgtctgcatctgtaggagacagagtcaccatcacttgccgggcaagtcagaccattagcagctttttaaattggtatcagcagaaaccagggaaagcccctaagctcctgatctatgctgcatccagtttgcaaagtggggtcccatcaaggttcagtggcagtggatccgggacagatttcacactcatcatcagcaatctgcaacctgaagattttgcaacttactactgtcaacagagttacagtaccccgtggacgttcggccaagggaccaaggtggaaatcaaac

SEQ ID NO: 11864 - DNA, 328 bp, Homo sapiens
gaaattgtgttgacacagtctccagccaccctgtctttgtctccaggagaaagagccaccctctcctgcagggccagtcagagtgttagcggctctttagcctggtaccaacagaaacctggccaggctcccaggctcctcatctatgatgcttccaacagggccactggcatcccagccaggttcagtggcagtgggtccgggacagacttcactctcaccatcagcagcctagagcctgaagattttgcagtttattactgtcagcagcgttccaactggcctcgagcgctcactttcggcggagggaccaaggtggagatcaaac

SEQ ID NO: 11865 - DNA, 331 bp, Homo sapiens; identical to SEQ ID NO: 1021

SEQ ID NO: 11866 - DNA, 331 bp, Homo sapiens
cagtctgccctgactcagcctgcctccgtgtctgggtctcctggacagtcgatcaccatatcctgcactggaaccaacagtgacattggtgcttataactatgtctactggtaccaacagcacccaggcaaagcccccaaagtcatcatttatgacgtcactaatcggccctcaggggtttcttatcgcttctctggctccaagtctggcagcgcggcctccctgaccatctctggactccaggctgaggacgaggctgattattactgcagctcatacacaagcattaagactgtgatattcggcggagggaccaagctgaccgtcctag

SEQ ID NO: 11867 - DNA, 325 bp, Homo sapiens
tcctatgagctgacacagccaccctcggtgtcagtgtccccaggacaaacggccaggatcacctgctctggagatgcattgccaacaaaatatgtttcttggtaccagcagaagtcaggccaggcccctgtactggtcatctatggggacaccaaacgaccctccgggatccctgagagattctctggctccagctcagggacaatggccaccttgattatcagtggggcccaggtggaagatgaagctgactactattgtttctcaacagacagtagtggtgatcgtaaaatattcggcggagggaccagtctgaccgtcctag

SEQ ID NO: 11868 - DNA, 325 bp, Homo sapiens; identical to SEQ ID NO: 6056

SEQ ID NO: 11869 - DNA, 328 bp, Homo sapiens
tcctatgtgctgagtcagccaccctcggtgtcggtagccccaggacagccggccaggattacctgtgggggaaacaacattggaagttacagtgtgcagtggtaccagcagaagccaggccaggcccctgtgctggtcgtctatgataataaagaccggccctcagggatccctgagcgattctctggctccaactctgggatcacggccaccctaaccatcagctgggtcgaagccggggatgaggccgactattactgtcaggtgtgggatactaatagtgatcatcgttgggtgtttggcggagggaccaagctgaccatcctag

SEQ ID NO: 11870 - DNA, 325 bp, Homo sapiens
gaaattgtgttgacgcagtctccaggcaccctgtctttgtctccaggggaaagagccaccctctcctgcagggccagtcagagtgttagcagcagctacttagcctggtaccagcagaaacctggccaggctcccaggctcctcatctatggtgcatccagcagggccactggcatcccagacaggttcagtggcagtgggtctgggacagacttcactctcaccatcagcagactggagcctgaagattttgcagtgtattactgtcagcagtatggtagctcacggtggacgttcggccaagggaccaaggtggaaatcaaac

SEQ ID NO: 11871 - DNA, 322 bp, Homo sapiens; identical to SEQ ID NO: 3949

SEQ ID NO: 11872 - DNA, 334 bp, Homo sapiens; identical to SEQ ID NO: 1621

SEQ ID NO: 11873 - DNA, 319 bp, Homo sapiens
gaaattgtgttgacacagtctccagccaccctgtctttgtctccaggggaaagagccaccctctcctgcagggccagtcagagtgttagcagctacttagcctggtaccaacagaaacctggccaggctcccaggctcctcatccatgatgcatcaaacagggccactggcctcccagccaggttcagtggcagtgggtctgggacagacttcactctcaccatcagcagcctagatcctgaagattttgcagtttattactgtcagcagcgtagcagctggccgtacacttttggccaggggaccaaactggagatca

SEQ ID NO: 11874 - DNA, 340 bp, Homo sapiens; identical to SEQ ID NO: 5926

SEQ ID NO: 11875 - DNA, 334 bp, Homo sapiens
cagtctgtgctgactcagccaccctcagcgtctgggacccccgggcagagggtcaccatctcttgttctggaagcagctccaacatcggaagtaatactgtaaactggtaccagcagctcccaggaacggcccccaaactcctcatctataataataatcagcggccctcaggggtccctgaccgattctctggctccaagtctggcacctcagcctccctggccatcagtgggctccagtctgaggatgaggctgattattactgtgcagcatgggatgacagcctgaatggtcgagtggtcttcggcggagggaccaagctgaccgtcctag

SEQ ID NO: 11876 - DNA, 328 bp, Homo sapiens
gaaattgtgttgacacagtctccagccaccctgtctttgtctccaggggaaagagccaccctctcctgcagggccagtcagagtgttagcagctacttagcctggtaccaacagaaacctggccaggctcccaggctcctcatctatgatgcatccaacagggccactggcatcccagccaggttcagtggcagtgggtctgggacagagttcactctcaccatcagcagcctgcagtctgaagattttgcagtttattactgtcagcagcgtagcaactggcctccgacttggcatttcggccctgggaccaaagtggatatcaaac

SEQ ID NO: 11877 - DNA, 322 bp, Homo sapiens; identical to SEQ ID NO: 2510

SEQ ID NO: 11878 - DNA, 325 bp, Homo sapiens
gaaattgtgttgacgcagtctccaggcaccctgtctttgtctccaggggaaagagccaccctctcctgcagggccagtcagagtgttagcagcagctacttagcctggtaccagcagaaacctggccaggctcccaggctcctcatctatggtgcatccagcagggccactggcatcccagacaggttcagtggcagtgggtctgggacagacttcactctcaccatcagcagactggagcctgaagattttgcagtgtattactgtcagcagtataatacctccccgaggacgttcggccaagggaccaaggtggaaatcaaac

SEQ ID NO: 11879 - DNA, 322 bp, Homo sapiens
gacatccagatgacccagtctccatcttccgtgtctgcatctgtaggagacagagtcaccatcacttgtcgggcgagtcagggtattagttactggttaacctggtatcagcagaaaccagggaaaccccctaaggtcctgatatatggtgcatccagtttgcaaagtggggtcccatcgaggttcagcggctttggatctgggacggacttcactctcaccatcaccagcctgcagcctgaagattttgcaacttactattgtcaacaggctaacagtatgccgctcactttcggcggagggaccaaggtcgagatgaaac

SEQ ID NO: 11880 - DNA, 331 bp, Homo sapiens; identical to SEQ ID NO: 11779

SEQ ID NO: 11881 - DNA, 331 bp, Homo sapiens
cagtctgtgttgacgcagccgccctcagtgtctgcggccccaggacagaaggtcaccatctcctgctctggaagcaactccgacattggaaaaaattatgtatcctggtaccagcagctcccaggaacagcccccaaattcctcatttatgacaatagtaagcgaccctcagggattcctgaccgattctctggctccaaatctggcacgtcagccaccctgggcatcaccggactccagactggggacgaggccgattattactgcggagcatgggatagcagcctgaatggttgggtgttcggcggagggaccaagctgaccgtcctag

SEQ ID NO: 11882 - DNA, 322 bp, Homo sapiens; identical to SEQ ID NO: 8162

SEQ ID NO: 11883 - DNA, 322 bp, Homo sapiens
gacatccagatgacccagtctccatcttccgtgtctgcatctgtaggagacagagtcaccatcacttgtcgggcgagtcagggtattagcagctggttagcctggtatcaacagaaaccagggaaagcccctaacctcctgatctacgctgcatccagtttacaaagtggggtcccatcaaggttcagcggcagtggatctgggacagatttcactctcaccatcagcagcctgcagcctgaagattttgcaacttactattgtcaacaggctaacagtttcccctggacgttcggccaagggaccaaggtggaaatcaaac

SEQ ID NO: 11884 - DNA, 327 bp, Homo sapiens
cagtctgtgctgactcagccaccctcagcgtctgggacccccgggcagagggtcaccatctcttgttctggaagcagctccaacatcggaactaattatgtattctggtaccagcagctcccaggaacggcccccaaagtcctcatctataggaataatcagcggccctcaggggtccctgaccgattctctggctccaagtctggcacctcagcctccctggccatcagtgggctccggtccgaggatgaggctgattattactgtgcagcatgggatgacagcctgacctgggtgttcggcggagggaccaagctgaccgtccta

SEQ ID NO: 11885 - DNA, 340 bp, Homo sapiens
gacatcgtgatgacccagtctccagactccctggctgtgtctctgggcgagagggccaccatcaactgcaagtccagccagagtgttttatacagctccaacaataagaactacttagcttggtaccagcagaaaccaggacagcctcctaagctgctcatttactgggcatctacccgggaatccggggtccctgaccgattcagtggcagcgggtctgggacagatttcactctcaccatcagcagcctgcaggctgaagatgtggcagtttattactgtcagcaatattatagtaccgtgtacacttttggccaggggaccaagctggagatcaaac

SEQ ID NO: 11886 - DNA, 331 bp, Homo sapiens
cagtctgccctgactcagcctgcctccgtgtctgggtctcctggacagtcgatcaccatctcctgcactggaaccagcagtgacgttggtggttattactatgtctcctggtaccagcagcacccaggcaaagcccccaaactcatgatttatgaggtcagtaatcggccctcaggggtttctaatcgcttctctggctccaagtctggcaacacggcctccctgaccatctctgggctccaggctgaggacgaggctgattattactgcagctcatatacaaccagcagcactgtggtattcggcggagggaccaagctgaccgtcctag

SEQ ID NO: 11887 - DNA, 325 bp, Homo sapiens
gaaatagtgatgacgcagtctccagccaccctgtctgtgtctccaggggaaagagccaccctctcctgcagggccagtcagagtgttagcagcaacttagcctggtaccagcagaaacctgggcaggctcccaggctcctcatctatggtgcatccaccagggccactggtatcccagccaggttcagtggcagtgggtctgggacagagttcactctcaccatcagcagcctgcagtctgaagattttgcagtttattactgtcagcagtataataactggcctcgggggacgttcggccaagggaccaaggtggaaatcaaac

SEQ ID NO: 11888 - DNA, 337 bp, Homo sapiens
cagcttgtgctgactcaatcgccctctgcctctgcctccctgggagcctcggtcaacctcacctgcactctgagcagtgggcacagcagctacgccatcgcatggcatcagcagcagccagagaagggccctcggtacttgatgaagcttaatagtgatggcagccacaccaagggggacgggatccctgatcgcttctcaggctccagttctggggctgagcgctacctcaccatctccagcctccagtctgaggatgaggctgactattactgtcagacctggggcactggcactcatgtggtattcggcggagggaccaagctgaccgtcctag

SEQ ID NO: 11889 - DNA, 322 bp, Homo sapiens
gacatccagatgacccagtctccatcctccctgtctgcatctgtaggagacagagtcaccatcacttgccaggcgagtcaggacattagcaactatttaaattggtatcagcagaaaccagggaaagcccctaagctcctgatctacgatgcatccaatttggaaacaggggtcccatcaaggttcagtggaagtggatctgggacagattttactttcaccatcagcagcctgcagcctgaagatattgcaacatattactgtcaacagtatgataatctcccttcggtcaccttcggccaagggacacgactggagatta

SEQ ID NO: 11890 - DNA, 319 bp, Homo sapiens
gacatccagatgacccagtctccttccaccctgtctgcatctgtaggagacagagtcaccatcacttgccgggccagtcagagtattagtagctggttggcctggtatcagcagaaaccagggaaagcccctaagctcctgatctataaggcgtctagtttagaaagtggggtcccatcaaggttcagcggcagtggatctgggacagaattcactctcaccatcagcagcctgcagcctgatgattttgcaacttattactgccaacagtataatagttattcgacgttcggccaagggaccaaggtggaaatcaaac

SEQ ID NO: 11891 - DNA, 319 bp, Homo sapiens
gacatccagatgacccagtctccttccaccctgtctgcatctgtaggagacagagtcaccatcacttgccgggccagtcagagtattagtagctggttggcctggtatcagcagaaaccagggaaagcccctaagctcctgatctataaggcatctagtttagaaagtggggtcccatcaaggttcagcggcagtggatctgggacagaattcactctcaccatcagcagcctgcagcctgatgattttgcaacttattactgccaacagtataatagtttgtggacgttcggccaagggaccaaggtggaaatcaaac

SEQ ID NO: 11892 - DNA, 331 bp, Homo sapiens
cagtctgccctgactcagcctgcctccgtgtctgggtctcctggacagtcgatcaccatatcctgcactggaaccagcagtgacgttggtacttataactatgtctactggtaccaacagcacccaggcaaagcccccaaagtcatgatttatgacgtcagtaatcggccctcaggggtttctaatcgcttctctggctccaagtctggcaacatggcctccctgaccatctctggactccaggctgaggacgaggctgattattactgcagctcatacacaagcattaacactgtggtattcggcggagggaccaagctgaccgtcctag

SEQ ID NO: 11893 - DNA, 322 bp, Homo sapiens
gacatccagatgacccagtctccttccaccctgtctgcatctgtaggagacagagtcaccatcacttgccgggccagtcagagtattagtacctggttggcctggtatcagcagaaaccagggaaagcccctaagctcctgatctataaggcgtctagtttagaaagtggggtcccatcaaggttcagcggcagtggatctgggacagaattcactctctccatcagcagcctgcagcctgatgattttgcaacttattactgccaacagtataatagttatccttggacgttcggccaagggaccaaggtggaaatcaaac

SEQ ID NO: 11894 - DNA, 337 bp, Homo sapiens; identical to SEQ ID NO: 10995

SEQ ID NO: 11895 - DNA, 325 bp, Homo sapiens
gaaattgtgttgacgcagtctccaggcaccctgtctttgtctccaggggaaagagccaccctctcctgcagggccagtctgagtgttagcagcagctccttagcctggtaccagcagaaacctggccaggctcccaggctcctcatctatggtgcatccagcagggccactggcatcccagtcaggttcagtggcagtgggtctgggacagacttcactctcaccatcagcagactggagcctgaagattttgcagtgtattactgtcagcagtatggtagctcaccgtggacgttcggccaagggaccaaggtggaaatcaaac

SEQ ID NO: 11896 - DNA, 319 bp, Homo sapiens
gacatccagatgacccagtctccttccaccctgtctgcatctgtaggagacagagtcaccatcacttgccgggccagtcagagtattagtagctggttggcctggtatcagcagaaaccagggaaagcccctaagctcctgatctataaggcgtctagtttagaaagtggggtcccatcaaggttcagcggcagtggatctgggacagaattcactctcaccatcagcagcctgcagcctgatgattttgcaacttattactgccaacagtataatagttattgcacttttggccaggggaccaagctggagatcaaac

SEQ ID NO: 11897 - DNA, 322 bp, Homo sapiens; identical to SEQ ID NO: 3903

SEQ ID NO: 11898 - DNA, 340 bp, Homo sapiens
gacatcgtgatgacccagtctccagactccctggctgtgtctctgggcgagagggccaccatcaactgcaagtccagccagagtgttttatacagctccaacaataagaactacttagcttggtaccagcagaaaccaggacagcctcctaagctgctcatttactgggcatctacccgggaatccggggtccctgaccgattcagtggcagcgggtctgggacagatttcactctcaccatcagcagcctgcaggctgaagatgtggcagtttattactgtcaacaatattatattgctccgtacgcttttggccaggggaccaagctggagatcaaac

SEQ ID NO: 11899 - DNA, 334 bp, Homo sapiens
cagtctgtgctgacgcagccgccctcagtgtctggggccccagggcagagggtcaccatctcctgcactgggagcagctccaacatcggggcaggttatgatgtacactggtaccagcagcttccaggaacagcccccaaactcctcatctatggtaacagcaatcggccctcaggggtccctgaccgattctctggctccaagtctggcacctcagcttccctggccatcactggcctccgggctgaggatgaggctgattattattgccagacctatgacaacagcctgaatggttgggtgttcggcggagggaccaagctgaccgtcctag

SEQ ID NO: 11900 - DNA, 337 bp, Homo sapiens; identical to SEQ ID NO: 1618

SEQ ID NO: 11901 - DNA, 322 bp, Homo sapiens; identical to SEQ ID NO: 7936

SEQ ID NO: 11902 - DNA, 320 bp, Homo sapiens
catccagttgacccagtctccatcctccctgtctgcatctgtaggagacagagtcaccatcacttgccgggccagtcagggcattagcagttatttagcctggtatcagcaaaaaccagggaaagcccctaagctcctgatctatgctgcatccactttgcaaagtggggtcccatcaaggttcagcggcagtggatctgggacagatttcactctcaccatcagcagcctgcagcctgaagattttgcaacttattactgtcaacagtattatagtacccctccgacgttcggccaagggaccaaggtggacatcaaac

SEQ ID NO: 11903 - DNA, 322 bp, Homo sapiens
gacatccagatgacccagtctccatcctccctgtctgcatctgtaggagacagagtcaccatcacttgccgggcaagtcagagcattagcagctatttaaattggtatcagcagaaaccagggaaagcccctaagctcctgatctatgctgcatccagtttgcaaagtggggtcccatcaaggttcagtggcagtggatctgggacagatttcactctcaccatcagcagtctgcaacctgaagattttgcaacttactactgtcaacagagttacagtaccatattcactttcggccctgggaccaaagtggatatcaaac

SEQ ID NO: 11904 - DNA, 328 bp, Homo sapiens
gaaattgtgttgacgcagtctccaggcaccctgtctttgtctccaggggaaagagccaccctctcctgcagggccagtcagagtgttagcagcagctacttagcctggtaccagcagaaacctggccaggctcccaggctcctcatctatggtgcatccagcagggccactggcatcccagacaggttcagtggcagtgggtctgggacagacttcactctcaccatcagcagactggagcctgaagattttgcagtgtattactgtcagcagtatggtagctcaccaccgtacacttttggccaggggaccaagctggagatcaaac

SEQ ID NO: 11905 - DNA, 325 bp, Homo sapiens
gaaattgtgttgacgcagtctccaggcaccctgtctttgtctccaggggaaagagccaccctctcctgcagggccagtcagagtgttagcagcagctacttagcctggtaccagcagaaacctggccaggctcccaggctcctcatctatggtgcatccagcagggccactggcatcccagacaggttcagtggcagtgggtctgggacagacttcactctcaccatcagcagactggagcctgaagattttgcagtgtattactgtcagcagtatggtagctcaccgggcacttttggccaggggaccaagctggagatcaaac

SEQ ID NO: 11906 - DNA, 331 bp, Homo sapiens
cagtctgccctgactcagcctgcctccgtgtctgggtctcctggacagtcgatcaccatctcctgcactggaaccagcagtgacgttggtcgttataactatgtctcctggtaccaacagcacccaggcaaagcccccaaactcatgatttatgaggtcaataatcggccctcaggggtttctgatcgcttctctggctccaagtctgacaacacggcctccctgaccatctctgggctccaggctgaggacgaggctgattattactgcagctcatatacaagcatcagcacttcggtgttcggcggagggaccaagctgaccgtcctag

SEQ ID NO: 11907 - DNA, 322 bp, Homo sapiens; identical to SEQ ID NO: 10800

SEQ ID NO: 11908 - DNA, 328 bp, Homo sapiens
gaaatagtgatgacgcagtctccagccaccctgtctgtgtctccaggggaaagagccaccctctcctgcagggccagtcagagtgttagcagcaacttagcctggtaccagcagaaacctggccaggctcccaggctcctcatctatggtgcatccaccagggccactggtatcccagccaggttcagtggcagtgggtctgggacagagttcactctcaccatcagcagcctgcagtctgaagattttgcagtttattactgtcagcagtataataactggcctcccctattcactttcggccctgggaccaaagtggatatcaaac

SEQ ID NO: 11909 - DNA, 325 bp, Homo sapiens; identical to SEQ ID NO: 4861

SEQ ID NO: 11910 - DNA, 331 bp, Homo sapiens
cagtctgccctgactcagcctcgctcagtgtccgggtctcctggacagtcagtcaccatctcctgcactggaaccagcagtgatgttggtggttataactatgtctcctggtaccaacaacacccaggcaaagcccccaaactcatgatttatgatgtcagtaagcggccctcaggggtccctgatcgcttctctggctccaagtctggcaacacggcctccctgagcatctctgggctccaggctgaggatgaggctgattattactgctgctcatatgcaggcagctacttttgggtgttcggcggagggaccaagctgaccgtcctag

SEQ ID NO: 11911 - DNA, 322 bp, Homo sapiens; identical to SEQ ID NO: 837

SEQ ID NO: 11912 - DNA, 340 bp, Homo sapiens
gacatcgtgatgacccagtctccagactccctggctgtgtctctgggcgagagggccaccatcaactgcaagtccagccagactgttttatacagctccaacaataagaactacttagcttggtaccagcagaaaccaggacagcctcctaaactgctcattcactgggcatctacccgggaatccggggtccctgaccgattcagtggcagcgggtctgggacagatttcactctcaccatcagcagcctgcaggctgaagatgtggcagtttattactgtcagcaatattttaatactcctcggacgttcggccaagggaccaaggtggaaatcaaac

SEQ ID NO: 11913 - DNA, 322 bp, Homo sapiens; identical to SEQ ID NO: 10725

SEQ ID NO: 11914 - DNA, 340 bp, Homo sapiens
gatgttgtgatgactcagtctccactctccctgcccgtcacccttggacagccggcctccatctcctgcaggtctagtcaaagcctcgtacacagtgatggaaacacctacttgaattggtttcagcagaggccaggccaatctccaaggcgcctaatttataaggtttctaaccgggactctggggtcccagacagattcagcggcagtgggtcaggcactgacttcacactgaaaatcagcagggtggaggctgaggatgttggggtttattactgcatgcaaggtacacactggcccccctacacttttggccaggggaccaacctggagatcaaac

SEQ ID NO: 11915 - DNA, 325 bp, Homo sapiens
gaaattgtgttgacacagtctccagccaccctgtctttgtctccaggggaaagagccaccctctcctgcagggccagtcagagtgttagcaactacttagcctggtaccaacagaaacctggccaggctcccaggctcctcatctatgatgcatccaacagggccactggcatcccagccaggttcagtggcagtgggtctgggacagacttcactctcaccatcagcagcctagagcctgaagattttgcagtttattactgtcagcagtataataactggcctccgtacacttttggccaggggaccaagctggagatcaaac

SEQ ID NO: 11916 - DNA, 337 bp, Homo sapiens
cagtctgccctgactcagcctgcctccgtgtctgggtctcctggacagtcgatcaccatctcctgcactggaaccagcagtgacgttggtggttataactatgtctcctggtaccaacagcacccaggcaaagcccccaaactcatcatttatgaggtcagtgatcggccctcaggggtttctaatcgcttctctggctccaagtctggcaacacggcctccctgaccatctctgggctccaggctgaggacgaggctgattattactgcaactcatatgcaaccagcagcactccccattgggtgttcggcggagggaccaagctgaccgtcctag

SEQ ID NO: 11917 - DNA, 322 bp, Homo sapiens; identical to SEQ ID NO: 4853

SEQ ID NO: 11918 - DNA, 329 bp, Homo sapiens
cagactgtggtgacccaggagccatcgttctcagtgtcccctggagggacagtcacactcacttgtggcttgaactctggctcagtctctactagtgactacgccagctggtaccagcagaccccaggccaggctccacgcacactcatctacagcacaaacactcgatcctctggggtccctgatcgcttctctggctccatccttggggacaaagctgccctcaccatcacgggggcccaggcggatgatgaatgtgtttattactgtctgctctatatgggtggtggcactgcgctgttcggcggaggcaccaagctgaccgtcct

SEQ ID NO: 11919 - DNA, 340 bp, Homo sapiens
gacatcgtgatgacccagtctccagactccctggctgtgtctctgggcgagagggccaccatcaactgcaagtccagccagagtgttttatacagctccaacaataagaactacttagcttggtaccagcagaaaccaggacagcctcctaacctgctcatttactgggcatctacccgggaatccggggtccctgaccgattcagtggcagcgggtctgggacagatttcactctcaccatcagcagcctgcaggctgaagatgtggcagtttattactgtcagcaatattatagtcctccttacacttttggccaggggaccaagctggagatcaaac

SEQ ID NO: 11920 - DNA, 334 bp, Homo sapiens
cagtctgccctgactcagcctgcctccgtgtctgggtctcctggacagtcgatcaccatctcctgcactggaaccagcagtgacgttggtggttataactatgtctcctggtaccaacagcacccaggcaaagcccccaaactcatgatttatgaggtcagtaatcggccctcaggggtttctaatcgcttctctggctccaagtctggcaacacggcctccctgaccatctctgggctccaggctgaggacgaggctgattattactgcagctcatatacaagcagcagcactctcgaagtattcggcggagggaccaagctgaccgtcctag

SEQ ID NO: 11921 - DNA, 323 bp, Homo sapiens
catccagttgacccagtctccatcctccctgtctgcatctgtaggagacagagtcaccatcacttgccgggccagtcagggcattagcagttatttagcctggtatcaacaaaaaccagggaaagcccctaagctcctgatctatgctgcatccactttgcaaagtggggtcccatcaaggttcagcggcagtggatctgggacagatttcactctcaccatcagcagcctgcagcctgaagattttgcaacttattactgtcaacagcttgatagttaccctccgggaacgttcggccaagggaccaaggtggaaatcaaac

SEQ ID NO: 11922 - DNA, 322 bp, Homo sapiens
gaaatagtgatgacgcagtctccagccaccctgtctgtgtctccaggggaaagagccaccctctcctgcagggccagtcagagtgttagcagcaacttagcctggtaccagcagaaacctggccaggctcccaggctcctcatctatggtgcatccaccagggccactggtatcccagccaggttcagtggcagtgggtctgggacagagttcactctcaccatcagcagcctgcagtctgaagattttgcagtttattactgtcagcagtataataactgggcggggacttttggccaggggaccaagctggagatcaaac

SEQ ID NO: 11923 - DNA, 335 bp, Homo sapiens
caacttgtgctgactcaatcgccctctgcctctgcctccctgggagcctcggtcaagctcacctgcactctgaacagtgggcgcatcagctacgccatcgcttggcatcagcagcagccagagaagggccctcggttcttgatgaaggttaacagtgatggcagccacaccaagggggacgggatccctgatcgcttctcaggctccagttctggggctgagcgctacctcaccatctccagtctccagtctgaggatgaggctgactattactgtcagacctggggcactggcattcatatggtattcggcggagggaccaagctgaccgtcct

SEQ ID NO: 11924 - DNA, 322 bp, Homo sapiens; identical to SEQ ID NO: 2538

SEQ ID NO: 11925 - DNA, 325 bp, Homo sapiens
gaaattgtgttgacacagtctccagccaccctgtctttgtctccaggggaaagagccaccctctcctgcagggccagtcagagtgttagcagctacttagcctggtaccaacagaaacctggccaggctcccaggctcctcatctatgatgcatccaacagggccactggcatcccagccaggttcagtggcagtgggtctgggacagacttcactctcaccatcagcagcctagagcctgaagattttgcagtttattactgtcagcagcgtagcaactggccaccgtacacttttggccaggggaccaagctggagatcaaac

SEQ ID NO: 11926 - DNA, 328 bp, Homo sapiens
cagtctgtgctgacgcagccgccctcagtgtctggggccccagggcagagggtcaccatctcctgcactgggagcagctccaacatcggggcaggttatgatgtacactggtaccagcagcttccaagaacagcccccaaactcctcatctatggtaacagcaatcggccctcaggggtccctgaccgattctctggctccaagtctggcacctcagcctccctggccatcactgggctccgggctgaggatgaggctgattattactgccagtcctatgacagcagctttgtgttattcggcggagggaccaagctgaccgtcctag

SEQ ID NO: 11927 - DNA, 340 bp, Homo sapiens
gatgttgtgatgactcagtctccactctccctgcccgtcacccttggacagccggcctccatctcctgcaggtctagtcaaagcctcgtacacagtgatggaaacacctacttgaattggtttcagcagaggccaggccaatctccaaggcgcctaatttataaggtttctaaccgggactctggggtcccagacagattcagcggcagtgggtcaggcactgatttcacactgaaaatcagcagggtggaggctgaggatgttggggtttattactgcatgcaaggtacacactggccctcgctcactttcggcggagggaccaaggtggagatcaaac

SEQ ID NO: 11928 - DNA, 322 bp, Homo sapiens
gacatccagatgacccagtctccatcctccctgtctgcatctgtaggagacagagtcaccatcacttgccgggcaagtcagagcattagcagctatttaaattggtatcagcagaaaccagggaaagcccctaagctcctgatctatgctgcatccagtttgcaaagtggggtcccatcaaggttcagtggcagtggatctgggacagatttcactctcaccatcagcagtctgcaacctgaagattttgcaacttactactgtcaacagagttacagtacccctccgacttttggccaggggaccaagctggagatcaaac

SEQ ID NO: 11929 - DNA, 328 bp, Homo sapiens
tcctatgagctgacacagccaccctcggtgtcagtgtccccaggacaaacggccaggatcacctgctctggagatgcattgccaaaaaaatatgcttattggtaccagcagaagtcaggccaggcccctgtactggtcatctatgaggacagcaaacgaccctccgggatccctgagagattctctggctccagctcagggacaatggccaccttgtctatcagtggggcccgagtggaggatgaagctgactactactgttactcaacagacagcagtgataatcataggagggtgttcggcggagggaccaagctgaccgtcctag

SEQ ID NO: 11930 - DNA, 331 bp, Homo sapiens
cagtctctgctgactcagccaccctcagcgtctgggacccccgggcagagggtcaccatctcttgttctggaagcaactccaacaccggaagtaatactgtaaactggtaccagcagctcccaggaacggcccccaaactcctcatctacagtaataatcagcggccctcaggggtccctgaccgattctctggctccaagtctggcacctcagcctccctggccatcaatgggctccagtctgaggatgaggctgattattactgtgcagcatgggatgacagcctgaatggtctggtattcggcggagggaccaagctgaccgtcctag

SEQ ID NO: 11931 - DNA, 335 bp, Homo sapiens; identical to SEQ ID NO: 11776

SEQ ID NO: 11932 - DNA, 325 bp, Homo sapiens
gaaattgtgttgacgcagtctccaggcaccctgtctttgtctccaggggaaagaggcaccctctcctgcagggccagtcagagtgttagcagcagctacttagcctggtaccaacagaaacctggccaggctcccaggctcctcatctatggtgcatccagcagggccactggcatcccagacaggttcagtggcagtgggtctgggacagacttcactctcaccatcagcagactggagcctgaagattttgcagtgtattactgtcagcagtatggtagctcaccgtggacgttcggccaagggaccaaggtggaaatcaaac

SEQ ID NO: 11933 - DNA, 322 bp, Homo sapiens
gacatccagatgacccagtctccttccaccctgtctgcatctgtaggagacagagtcaccatcacttgccgggccagtcagagtattagtagctggttggcctggtatcagcagaaaccagggaaagcccctaagctcctgatctataaggcatctagtttagaaagtggggtcccatcaaggttcagcggcagtggatctgggacagaattcactctcaccatcagcagcctgcagcctgatgattttgcaacttattactgccaacagtataatagttacccgtggacgttcggccaagggaccaaggtggaaatcaaac

SEQ ID NO: 11934 - DNA, 337 bp, Homo sapiens
cagtctgtgttgacgcagccgccctcagtgtctgcggccccaggacagaaggtcaccatctactgctctggaagcagctccaacattgggagaaattatgtatcctggtaccagcagctcccaggaacagcccccaaagtcctcatttttgacaatgataagcgaccctcaggtattcctgaccgattctctggctccaagtctggcacgtcagccaccctggacatcaccggactccagattggggacgaggccgattattactgcggagcatgggatagtagtctgagtgctggcgggtgggtgttcggcggagggaccaagctgaccgtcctag

SEQ ID NO: 11935 - DNA, 334 bp, Homo sapiens
cagtctgtgctgacgcagccgccctcagtgtctggggccccagggcagagggtcaccatctcctgcactgggagcagctccaacatcggggcaggttatgatgtacactggtaccagcagcttccaggaacagcccccaaactcctcatctatggtaacagcaatcggccctcaggggtccctgaccgattctctggctccaagtctggcacctcagcctccctggccatcactgggctccaggctgaggatgaggctgattattactgccagtcctatgacagcagcctgagtgtccgggtgttcggcggagggaccaagctgaccgtcctag

SEQ ID NO: 11936 - DNA, 331 bp, Homo sapiens
cagtctgccctgactcagcctgcctccgtgtctgggtctcctggacagtcgatcaccatctcctgctctggaaccagcagtgacgttggtggttataactttgtctcctggtaccaacagcacccaggcaaagcccccaaactcatcatttatgaggtcactaatcggccctcaggggtttctaatcgcttctctggctccaagtctggcaacacggcctccctgaccatctctgggctccaggctgaggacgaggctgattattactgcagctcatatacaagtagtagcactagtgtgttcggcggagggaccaagctgaccgtcctag

SEQ ID NO: 11937 - DNA, 328 bp, Homo sapiens
gacatccagatgacccagtctccatcttccgtgtctgcatctgtaggagacagagtcaccatcacttgtcgggcgagtcagggtattagcagctggttagcctggtatcagcagaaaccagggaaagcccctaagctcctgatctatgctgcatccagtttgcaaagtggggtcccatcaaggttcagcggcagtggatctgggacagatttcactctcaccatcagcagcctgcagcctgaagattttgcaacttactattgtcaacaggctaacagtttccctcccctattcactttcggccctgggaccaaagtggatatcaaac

SEQ ID NO: 11938 - DNA, 322 bp, Homo sapiens; identical to SEQ ID NO: 3870

SEQ ID NO: 11939 - DNA, 325 bp, Homo sapiens
gaaattgtgttgacgcagtctccaggcaccctgtccttgtctccaggggagagagccaccctctcctgcagggccagtcagggtgttagcagcaactacttagcctggtaccagcagaagcctggccaggctcccaggctcctcatttatggtgtcttcagcagggccaccggcatcccagacaggttcagtggcagtgggtctgggacagacttcactctcaccatcagcagactggagcctgaagattctgcagtgtattactgtcagcactttgatagtccactgtacacttttggccaggggaccaagcttgagatcaaac

SEQ ID NO: 11940 - DNA, 322 bp, Homo sapiens; identical to SEQ ID NO: 8061

SEQ ID NO: 11941 - DNA, 325 bp, Homo sapiens
tcctatgagctgacacagccaccctcggtgtcagtgtccccaggacaaacggccaggatcacctgctctggagatgcattgccaaaaaaatatgcttattggtaccagcagaagtcaggccaggcccctgtgctggtcatctatgaggacagcaaacgaccctccgggatccctgagagattctctggctccagctcagggacaatggccaccttgactatcagtggggcccaggtggaggatgaagctgactactactgttactcaacagacagcagtggtaatttttgggtgttcggcggagggaccaagctgaccgtcctag

SEQ ID NO: 11942 - DNA, 322 bp, Homo sapiens
gaaattgtgctgactcagtctccagactttcagtctgtgactccaaaggagaaagtcaccatcacctgccgggccagtcagagcattggtagtagcttacactggtaccagcagaaaccagatcagtctccaaagctcctcatcaagtatgcttcccagtccatctcaggggtcccctcgaggttcagtggcagtggatctgggacagatttcaccctcaccatcaatagcctggaagctgaagatgctgcaacgtattactgtcatcagagtagtagttcacccaggacgttcggccaagggaccaaggtggaaatcaaac

SEQ ID NO: 11943 - DNA, 331 bp, Homo sapiens
cagtctgtgctgactcagccaccctcagcgtctgggacccccgggcagagggtcaccatctcttgctctggaagcagctccaacatcggaactaatactgtaaactggtaccagcagctcccaggaacggcccccaaactcctcatctatagtaataatcagcggccctcaggggtccctgaccgattctctggctccaagtctggcacctcagcctccctggccatcagtgggctccagtctgaggatgaggctgattattactgtgcagcatgggatgacagcctgaatggctgggtgttcggcggagggaccaagctgaccgtcctag

SEQ ID NO: 11944 - DNA, 322 bp, Homo sapiens
gccatccggatgacccagtctccatcctcattctctgcatctacaggagacagagtcaccatcacttgtcgggcgagtcagggtattagcagttatttagcctggtatcagcaaaaaccagggaaagcccctaagctcctgatctatgctgcatccactttgcaaagtggggtcccatcaaggttcagcggcagtggatctgggacagatttcactctcaccatcagctgcctgcagtctgaagattttgcaacttattactgtcaacagtattatagttacccctacacttttggccaggggaccaagctggagatcaaac

SEQ ID NO: 11945 - DNA, 325 bp, Homo sapiens
gaaattgtgttgacacagtctccagccaccctgtctttgtctccaggggaaagagccaccctctcctgcagggccagtcagagtgttagcagctacttagcctggtaccaacagaaacctggccaggctcccaggctcctcatctatgatgcatccaacagggccactggcatcccagccaggttcagtggcagtgggtctgggacagacttcactctcaccatcagcagcctagagcctgaagattttgcagtttattactgtcagcagcgtagcaactggccggggtacacttttggccaggggaccaagctggagatcaaac

SEQ ID NO: 11946 - DNA, 328 bp, Homo sapiens
gaaattgtgttgacacagtctccagccaccctgtctttgtctccaggggaaagagtcaccctctcctgcagggccagtcagagtattgccagctacttagcctggtaccaacagaaacctggccaggctcccaggctcctcatctatgctgcatccaccagggccactggcgtcccagccaggttcagtggcagtgggtctgggacagacttcactctcaccatcagcagcctagagcctgaagattttgcagtttattactgtcagcagcgtagaaactggcctcgtttgtacatttttggccaggggaccaggctggagatcaaac

SEQ ID NO: 11947 - DNA, 373 bp, Homo sapiens
caggtacagctgcaagagtcgggcccaggactggtgaagccttcggggaccctgtccctcacctgcgctgtctctggtggctccatcagcagtagtagctggtggagctgggtccgccagcccccagggaaggggctggagtggattggggaaatctatcatagtgggagcaccaactacaatccgtccctccagagtcgagtcaccatatcagtagacaagtccaagaaccagttctccctgaagctgagttctgtgaccgccgcggacacggccgtctattactgtgcgagaggggattatgataacatttgggggggttacggctggttcgacccctggggccagggaaccctggtcaccgtctcctcag

SEQ ID NO: 11948 - DNA, 373 bp, Homo sapiens
caggtacagctgcaagagtcgggcccaggactggtgaagccttcggggaccctgtccctcacctgcgctgtctctggtggctccatcagcagtagtagctggtggagctgggtccgccagcccccagggaaggggctggagtggattggggaaatctatcatagtgggagcaccaactacaatccgtccctccagagtcgagtcaccatatcagtagacaagtccaagaaccagttctccctgaagctgagttctgtgaccgccgcggacacggccgtctattactgtgcgagaggggattatgataacatttgggggggttacggctggttcgacccctggggccagggatccctggtcaccgtctcctcag

SEQ ID NO: 11949 - DNA, 373 bp, Homo sapiens; identical to SEQ ID NO: 11947

SEQ ID NO: 11950 - DNA, 373 bp, Homo sapiens
caggtacagctgcaggagtcgggcccaggactggtgaagccttcggggaccctgtccctcacctgcgctgtctctggtggctccatcagcagtagtagctggtggagctgggtccgccagcccccagggaaggggctggagtggattggggaaatctatcatagtgggagcaccaactacaatccgtccctcaagagtcgagtcaccatatcagtagacaagtccaagaaccagttctccctgaagctgagttctgtgaccgccgcggacacggccgtctattactgtgcgagaggggattatgataacatttgggggagttacggctggttcgacccctggggccagggaaccctggtcaccgtctcctcag

SEQ ID NO: 11951 - DNA, 373 bp, Homo sapiens; identical to SEQ ID NO: 11950

SEQ ID NO: 11952 - DNA, 373 bp, Homo sapiens
caggtacagctgcaggagtcgggcccaggactggtgaagccttcggggaccctgtccctcacctgcgctgtctctggtggctccatcagcagtagtagctggtggagctgggtccgccagccccccgggaaggggctggagtggattggggaaatctatcatagtgggagcaccaactacaatccgtccctcaagagtcgagtcaccatatcagtagacaagtccaagaaccagttctccctgaagctgagttctgtgaccgccgcggacacggccgtctattactgtgcgagaggggattatgataacatttgggggagttacggctggttcgacccctggggccagggaaccctggtcaccgtctcctcag

SEQ ID NO: 11953 - DNA, 373 bp, Homo sapiens; identical to SEQ ID NO: 11947

SEQ ID NO: 11954 - DNA, 373 bp, Homo sapiens; identical to SEQ ID NO: 11947

SEQ ID NO: 11955 - DNA, 373 bp, Homo sapiens
caggtacagctgcaggagtcgggcccaggactggtgaagccttcggggaccctgtccctcacctgcgttgtctctggtggctccatcagcagtagtagctggtggagctgggtccgccagcccccagggaaggggctggagtggattggggaaatctatcatagtgggagcaccaactacaatccgtccctcaagagtcgagtcaccatatcagtagacaagtccaagaaccagttctccctgaagctgagttctgtgaccgccgcggacacggccgtctattactgtgcgagaggggattatgataacatttgggggagttacggctggttcgacccctggggccagggaaccctggtcaccgtctcctcag

SEQ ID NO: 11956 - DNA, 373 bp, Homo sapiens
caggtacaactgcaggagtcgggcccaggactggtgaagccttcggggaccctgtccctcacctgcgctgtctctggtggctccatcagcagtagtagctggtggagctgggtccgccagcccccagggaaggggctggagtggattggggaaatctatcatagtgggagcaccaactacaatccgtccctcaagagtcgagtcaccatatcagtagacaagtccaagaaccagttctccctgaagctgagttctgtgaccgccgcggacacggccgtctattactgtgcgagaggggattatgataacatttgggggagttacggctggttcgacccctggggccagggaaccctggtcaccgtctcctcag

SEQ ID NO: 11957 - DNA, 373 bp, Homo sapiens; identical to SEQ ID NO: 11947

SEQ ID NO: 11958 - DNA, 373 bp, Homo sapiens
caggtacagctgcaggagtcgggcccaggactggtgaagccttcggggaccctgtccctcacttgcgctgtctctggtggctccatcagcagtagtagctggtggagctgggtccgccagcccccagggaaggggctggagtggattggggagatctattatagtgggagcaccaactacaatccgtccctcaagagtcgagtcaccatatcagtagacaagtccaagacccagttctccctgaagctgagttctgtgaccgccgcggacacggccgtctattactgtgcgagaggggattatgataacatttgggggagttacggctggttcgacccctggggccagggaaccctggtcaccgtctcctcag

SEQ ID NO: 11959 - DNA, 373 bp, Homo sapiens; identical to SEQ ID NO: 11950

SEQ ID NO: 11960 - DNA, 373 bp, Homo sapiens; identical to SEQ ID NO: 11950

SEQ ID NO: 11961 - DNA, 373 bp, Homo sapiens; identical to SEQ ID NO: 11947

SEQ ID NO: 11962 - DNA, 373 bp, Homo sapiens; identical to SEQ ID NO: 11947

SEQ ID NO: 11963 - DNA, 373 bp, Homo sapiens; identical to SEQ ID NO: 11950

SEQ ID NO: 11964 - DNA, 373 bp, Homo sapiens; identical to SEQ ID NO: 11947

SEQ ID NO: 11965 - DNA, 373 bp, Homo sapiens; identical to SEQ ID NO: 11947

SEQ ID NO: 11966 - DNA, 373 bp, Homo sapiens; identical to SEQ ID NO: 11947

SEQ ID NO: 11967 - DNA, 373 bp, Homo sapiens; identical to SEQ ID NO: 11947

SEQ ID NO: 11968 - DNA, 373 bp, Homo sapiens; identical to SEQ ID NO: 11947

SEQ ID NO: 11969 - DNA, 373 bp, Homo sapiens; identical to SEQ ID NO: 11947

SEQ ID NO: 11970 - DNA, 373 bp, Homo sapiens
caggtacagctgcaggagtcgggcccaggactagtgaagccttcggggaccctgtccctcacctgcgctgtctctggtggctccatcagcagcagtagctggtggagctgggtccgccagcccccagggaaggggctggagtggattggggaatcctatcatagtgggagcatcaactacaatccgtccctcaagagtcgagtcaccatatcagtagacaagtccaagaaccagttctccctcaagctgagttctgtgaccgccgcggacacggccgtctattactgtgcgagaggggattatgataacatttgggggggttacggctggttcgacccctggggccagggaaccctggtcaccgtctcctcag

SEQ ID NO: 11971 - DNA, 373 bp, Homo sapiens
caggtacagctgcaggagtcgggcccaggactggtgaagccttcggggaccctgtccctcacctgcgctgtctctggtggctccatcagcagtagtagctggtggagctgggtccgccagcccccagggaaggggctggagtggattggggaaatctatcatagtgggagcaccaactacaatccgtccctcaagagtcgagtcaccatatcagtagacaagtccaagaaccagttctccctgaggctgagttctgtgaccgccgcggacacggccgtctattactgtgcgagaggggattatgataacatttgggggagttacggctggttcgacccctggggccagggaaccctggtcaccgtctcctcag

SEQ ID NO: 11972 - DNA, 373 bp, Homo sapiens; identical to SEQ ID NO: 11947

SEQ ID NO: 11973 - DNA, 373 bp, Homo sapiens; identical to SEQ ID NO: 11947

SEQ ID NO: 11974 - DNA, 373 bp, Homo sapiens
caggtgcagctgcaggagtcgggcccaggactggtgaagccttcggagaccctgtccctcacctgcattgtctctggtggctccatcagtagttactactggagctggatccggcagcccccagggaagggactggagtggattgggtatatctattacagtgggagcaccaactacaacccctccctcaagagtcgagtcaccatatcagtagacacgtccaagaaccagttctccctgaagctgagctctgtgaccgctgcggacacggccgtgtattactgtgcgagaatggagagtagtgggagctactacggaaatgggggtgcttttgatatctggggccaagggacaatggtcaccgtttcttcag

SEQ ID NO: 11975 - DNA, 373 bp, Homo sapiens
caggtgcagctgcaggagtcgggcccaggactggtgaagccttcggagaccctgtccctcacctgcattgtctctggtggctccatcagtagttactactggagctggatccggcagcccccagggaagggactggagtggattgggtatatctattacagtgggagcaccaactacaacccctccctcaagagtcgagtcaccatatcagtagacacgtccaagaaccagttctccctgaagctgagctctgtgaccgctgcggacacggccgtgtattactgtgcgagaatggagagtagtgggagctactacggaaatgggggtgcttttgatatctggggccaagggacaatggtcaccgtctcttcag

SEQ ID NO: 11976 - DNA, 373 bp, Homo sapiens
caggtgcagctgcaggagtcgggcccaggactggtgaagccttcggagaccctgtccctcacctgcactgtctctggtggctccatcagtagttactactggagctggatccggcagcccccagggaagggactggagtggattgggtatatctattccagtgggagcgccaactacaacccctccctcaagagtcgagtcaccatatcagtagacacgtccaagaaccagttctccctgaagctgagctctgtgaccgctgcggacacggccgtgtattactgtgcgagaatggagagtagtgggagctactacggaaatgggggtgcttttgatgtctggggccaagggacaatggtcaccgtctcttcag

SEQ ID NO: 11977 - DNA, 373 bp, Homo sapiens
caggtgcagctgcaggagtcgggcccaggactggtgaagccttcggagaccctgtccctcacctgcactgtctctggtggctccatcagtagttactactggagctggatccggcagcccccagggaagggactggagtggattgggtatatctattacagtgggagcaccaactacaacccctccctcaagagtcgagtcaccatatcagtagacacgtccaagaaccagttctccctgaagctgagctctgtgaccgctgcggacacggccgtgtattactgtgcgagaatggagagtagtgggagctactacggaaatgggggtgcttttgatatctggggccaagggacaatggtcaccgtctcttcag

SEQ ID NO: 11978 - DNA, 373 bp, Homo sapiens
caggtgcagctgcaggagtcgggcccaggactggtgaagccttcggagaccctgtccctcacctgcactgtctctggtggctccatcagtggttactactggagctggatccggcagcccccagggaagggactggagtggattgggtatatctattacagtgggagcaccaactacaacccctccctcaagagtcgagtcaccatatcagtagacaagtccaagaaccagttctccctgaagctgagctctgtgaccgctgcggacacggccgtgtattactgtgcgagaatggagagtagtgggagctactacggaaatgggggtgcttttgatatctggggccaagggacaatggtcaccgtctcttcag

SEQ ID NO: 11979 - DNA, 373 bp, Homo sapiens
caggtgcagctgcaggagtcgggcccaggactggtgaagccttcggagaccctgtccctcacctgcactgtctctggtggctccatcagtagtttctactggagctggatccggcagcccccagggaagggactggagtggattgggtatatctattacagtgggagcaccaactacaacccctccctcaagagtcgagtcaccatatcagtagacacgtccaagaaccagttctccctgaggctgagctctgtgaccgctgcggacacggccgtgtatttctgtgcgagaatggagagtagtgggagctactacggaaatgggggtgcttttgatatctggggccaagggacaatggtcaccgtctcttcag

SEQ ID NO: 11980 - DNA, 373 bp, Homo sapiens
caggtgcagctgcaggagtcgggcccaggactggtgaagccttcggagaccctgtccctcacctgcactgtctctggtggctccatcagtagttactactggagctggatccggcagcccccagggaagggactggagtggattgggtatatctattacagtgggagcaccaactacaacccctccctcaagagtcgagtcaccatatcagtagacacgtccaagaaccagttctccctgaagctgagctctgtgaccgctgcggacacggccgtgtattactgtgcgagaatggagagtcgtgggagctactacggaaatgggggtgcttttgatatctggggccaagggacaatggtcaccgtctcttcag

SEQ ID NO: 11981 - DNA, 373 bp, Homo sapiens
caggtgcagctgcaggagtcgggcccaggactggtgaagccttcggagaccctgtccctcacctgcactgtctctggtggctccatcagtagttactactggagctggatccggcagcccccagggaagggactggagtggattggatatatgtattacagtgggagcaccaactacaaccccgccctcaagagtcgagtcgccatatcagtagacacgtccaagaaccagttctccctgaacctgagctctgtgaccgctgcggacacggccgtgtattactgtgcgagaatggagagtagtgtaagctactacggaaatgggggtgcttttgatatctggggccaagggacaatggtcaccgtctcttcag

SEQ ID NO: 11982 - DNA, 373 bp, Homo sapiens
caggtgcagctgcaggagtcgggcccaggactggtgaagccttcggagaccctgtccctcacctgcactgtctctggtggctccatcagtagttactactggagctggatccggcagcccccagggaagggactggagtggattggctatatctattacagtgggagcaccaactacaacccctccctcaagagtcgagtcaccatctcagtagacacgtccaagaaccagttctccctgaagctgagctctgtgaccgctgcggacacggccgtgtattactgtgcgagaatggagagtagtgggagctactacggaaatgggggtgcttttgatatctggggccaagggacaatggtcaccgtctcttcag

SEQ ID NO: 11983 - DNA, 320 bp, Homo sapiens
tgggaggtccctgagactctcctgtgcagcgtctggattcaccttcagtagctatggcatgcactgggtccgccaggctccaggcaaggggctggagtgggtggcagttatatggtatgatggaagtaataaatactatgcagactccgtgaagggccgattcaccatctccagagacaattccaagaacacgctgtatctgcaaatgaacagcctgagagccgaggacacggctgtgtattactgtgcgagaggtagagatggctacaccacgaactttgactactggggccagggaaccctggtcaccgtctcctcag

SEQ ID NO: 11984 - DNA, 361 bp, Homo sapiens
caggtgcagctggtggagtctgggggaggcgtggtccagcctgggaggtccctgagactctcctgtgcagcgtctggattcaccttcagtagctatggcatgcactgggtccgccaggctccaggcaaggggctggagtgggtggcagttatatggtatgatggaagtaataaatactatgcagactccgtgaagggccgattcaccatctccagagacaattccaagaacacgctgtatctgcaaatgaacagcctgagagccgaggacacggctatgtattactgtgcgagaggtagagatggctacaccacgaactttgactactggggccagggaaccctggtcaccgtctcctcag

SEQ ID NO: 11985 - DNA, 361 bp, Homo sapiens
caggtgcagctggtggagtctgggggaggcgtggtccagcctgggaggtccctgagactctcctgtgcagcgtctggattcaccttcagtagctatggcatgcactgggtccgccaggctccaggcaaggggctggagtgggtggcagttatatggtatgatggaagtaataaatactatgcagagtccgtgaagggccgattcaccatctccagagacaattccaagaacacgctgtatctgcaaatgaacagcctgagagccgaggacacggctgtgtattactgtgcgagaggtagagatggctacaccacgaactttgactactggggccagggaaccctggtcaccgtctcctcag

SEQ ID NO: 11986 - DNA, 361 bp, Homo sapiens; identical to SEQ ID NO: 11985

SEQ ID NO: 11987 - DNA, 361 bp, Homo sapiens; identical to SEQ ID NO: 11984

SEQ ID NO: 11988 - DNA, 361 bp, Homo sapiens; identical to SEQ ID NO: 11985

SEQ ID NO: 11989 - DNA, 361 bp, Homo sapiens; identical to SEQ ID NO: 11985

SEQ ID NO: 11990 - DNA, 361 bp, Homo sapiens; identical to SEQ ID NO: 11984

SEQ ID NO: 11991 - DNA, 361 bp, Homo sapiens; identical to SEQ ID NO: 11984

SEQ ID NO: 11992 - DNA, 376 bp, Homo sapiens
gaggtgcagctggtggagtctgggggaggcttggtccagcctggggggtccctgagactctcctgtgcagcctctggattcacctttactagatattggatgaactgggtccgccaggctccagggaaggggctggagtgggtggccaacataaaacaagatggaagtgagaaatactatgtggactctgtgaagggccgattcaccatctccagagacaacgccaagagttctctctttctgcaaatgaacagcctgagagccgaggacacggccgtgtattactgttcgagagggtttagcagtggctgggacaccctcctcaatgatgcttttgatatctggggccaagggacaatggtcaccgtctcttcag

SEQ ID NO: 11993 - DNA, 376 bp, Homo sapiens; identical to SEQ ID NO: 11992

SEQ ID NO: 11994 - DNA, 376 bp, Homo sapiens; identical to SEQ ID NO: 11992

SEQ ID NO: 11995 - DNA, 376 bp, Homo sapiens
gaggtgcagctggtggagtctgggggaggcttggtccagcctggggggtccctgagactctcctgtgcagcctctggattcacctttacttgatattggatgaactgggtccgccaggctccagggaaggggctggagtgggtggccaacataaaacaagatggaagtgagaaatactatgtggactctgtgaagggccgattcaccatctccagagacaacgccaagagttctctctttctgcaaatgaacagcctgagagccgaggacacggccgtgtattactgttcgagagggtttagcagtggctgggacaccctcctcaatgatgcttttgatatctggggccaagggacaatggtcaccgtctcttcag

SEQ ID NO: 11996 - DNA, 376 bp, Homo sapiens; identical to SEQ ID NO: 11992

SEQ ID NO: 11997 - DNA, 376 bp, Homo sapiens; identical to SEQ ID NO: 11992

SEQ ID NO: 11998 - DNA, 376 bp, Homo sapiens; identical to SEQ ID NO: 11992

SEQ ID NO: 11999 - DNA, 376 bp, Homo sapiens; identical to SEQ ID NO: 11992

SEQ ID NO: 12000 - DNA, 360 bp, Homo sapiens
caggtgcagctgcaggagtcgggcccaggactggtgaggccttcggagaccctgtccctcacctgcactgtctctggtcgctccatcagtagtgactactggagctggatccggcagccccccgggaagggactggagtggattgggtatatctatcacagtgggggtaccagttacaacccctccctcaagagtcgagtcaccatatcagtagacacgtccaagaaccagttctccctgaagttgagctctgtgaccgctgcggacacggccgtgtattactgtgcgactggctcggggtcctactactactactacatggacgtctggggcaaagggaccacggtcaccgtctcctca

SEQ ID NO: 12001 - DNA, 360 bp, Homo sapiens; identical to SEQ ID NO: 12000

SEQ ID NO: 12002 - DNA, 360 bp, Homo sapiens; identical to SEQ ID NO: 12000

SEQ ID NO: 12003 - DNA, 360 bp, Homo sapiens; identical to SEQ ID NO: 12000

SEQ ID NO: 12004 - DNA, 360 bp, Homo sapiens; identical to SEQ ID NO: 12000

SEQ ID NO: 12005 - DNA, 360 bp, Homo sapiens; identical to SEQ ID NO: 12000

SEQ ID NO: 12006 - DNA, 360 bp, Homo sapiens; identical to SEQ ID NO: 12000

SEQ ID NO: 12007 - DNA, 369 bp, Homo sapiens
gaggtgcagctgttggagtctgggggaggcttggtacagcctggggggtccctgagactctcctgtgcagcctctggattcacgtttagcagctctgccatgaactgggtccgccaggctccagggaaggggctggagtgggtctcagctcttagtggtggtggtggtagcacatactacgcagactccgtggagggccggttcaccatctccagagacaattccaagaacacggtgtatctgcaaatgaacagcctgagagccgaggacacggccgtatattactgtgcgaaagaccgcatagggccgtattacgatttttccggtatggacgtctggggccaagggaccacggtcaccgtctcctca

SEQ ID NO: 12008 - DNA, 369 bp, Homo sapiens
gaggtgcagctgttggagtctgggggaggcttggtacagcctggggggtccctgagactctcctgtgcagcctctggattcacgtttagcagctctgccatgaactgggtccgccaggctccagggaaggggctggagtgggtctcagctattagtggtggtggtggtagcacatactacgcagactccgtgaagggccggttcaccatctccagagacaattccaagaacacggtgtatctgcaaatgaacagcctgagagccgaggacacggccgtatattactgtgcgaaagatcgcatagggccgtattacgatttttccggtatggacgtctggggccaagggaccacggtcaccgtctcctca

SEQ ID NO: 12009 - DNA, 369 bp, Homo sapiens
gaggtgcagctgttggagtctgggggaggcttggtacagcctggggggtccctgagactctcctgtgcagcctctggattcacctttagcagctctgccatgaactgggtccgccaggctccagggaaggggctgcagtgggtctcagcaattagtggtggtggtggtagcacatactacgcagactccgtgaagggccggttcaccatctccagagacaattccaagaacacggtgtatctgcaaatgaacagcctgagagccgaggacacggccgtatattactgtgcgaaagatcgcatagggccgtattacgatttttccggtatggacgtctggggccaagggaccacggtcaccgtctcctca

SEQ ID NO: 12010 - DNA, 369 bp, Homo sapiens
gaggtgcagctgttggagtctgggggaggcttggtacagccgggggggtccctgagactctcctgtgtagcctctggattcacgtttagcaactctgccatgaactgggtccgccaggctccagggaaggggctggagtgggtctcagctcttagtggtggtggtggtagcacatactacgcagactccgtgaagggccggttcaccatctccagagacaattccaagaacacggtgtatctgcaaatgaacagcctgagagccgaggacacggccgtatattactgtgcgaaagatcgcatagggccgtattacgatttttccggtatggacgtctggggccaagggaccacggtcaccgtctcctca

SEQ ID NO: 12011 - DNA, 369 bp, Homo sapiens; identical to SEQ ID NO: 12008

SEQ ID NO: 12012 - DNA, 369 bp, Homo sapiens; identical to SEQ ID NO: 12008

SEQ ID NO: 12013 - DNA, 369 bp, Homo sapiens; identical to SEQ ID NO: 12007

SEQ ID NO: 12014 - DNA, 379 bp, Homo sapiens
cagctgcagctgcaggagtcgggcccaggactggtgaagccttcggagaccctgtccctcacctgtattgtccctggtggctccatcatcagtagtagtcactactggggctggatccgccagcccccaggggagggactggattggattgggaatgtttattatcgtggggacacctactacaacccgtccctcaagagtcgagtcaccatatccgtagacacgtccaagaagcagttctccctgaagatgagctctgtgaccgccgcagacacggctgtgtattactgtgcgagacgtattcctggtggcaattactatgatagtagtggtccctttgactactggggccagggaaccctggtcaccgtctcctcag

SEQ ID NO: 12015 - DNA, 379 bp, Homo sapiens
cagctgcagctgcaggagtcgggcccaggactggtgaagccttcggagaccctgtccctcacctgcactgtctctggtggctccatcagcagtagtagttactactggggctggatccgccagcccccagggaaggggctggagtggattgggagtatctattatagtgggagcacctactacaacccgtccctcaagagtcgagtcaccatatccgtagacacgtccaagaagcagttctccctgaagatgagctctgtgaccgccgcagacacggctgtgtattactgtgcgagacgtattcctggtggcaattactatgatagtagtggtccctttgactactggggccagggaaccctggtcaccgtctcctcag

SEQ ID NO: 12016 - DNA, 379 bp, Homo sapiens; identical to SEQ ID NO: 12015

SEQ ID NO: 12017 - DNA, 379 bp, Homo sapiens; identical to SEQ ID NO: 12015

SEQ ID NO: 12018 - DNA, 379 bp, Homo sapiens
cagctgcagctgcaggagtcgggcccaggactggtgaagccttcggagaccctgtccctcacctgcaccgtctctggtggctccatcagcagtagtagttactactggggctggatccgccagcccccagggaaggggctagagtggattgggagtatctattatagtgggagcacctactacaacccgtccctcaagagtcgagtcaccatatccgtagacacgtccaagaaacagttctccctgaagatgagctctgtgaccgccgcagacacggctgtgtattactgtgcgagacgtattcctggtggcaattactatgatagtagtggtccctttgactactggggccagggaaccctggtctccgtctcctcag

SEQ ID NO: 12019 - DNA, 379 bp, Homo sapiens; identical to SEQ ID NO: 12015

SEQ ID NO: 12020 - DNA, 372 bp, Homo sapiens
gaggtgcagctggtggagtctggaggaggcgtgatgcagccgggggggtccctgagactctcctgtgcagcctctgggttcaccgtcagtaacacctacatgacctgggtccgccaggctccagggaagggcctggagtgggtctcaattatttttaccggtggtgccacaaactacgcagactccgtgaagggccgattcaccatctccagagacaattccaagaacacggtgtattttcaaatgaacagcctgagagccgaggacacggccgtgtattactgtgcgagagtggggaaagatgactacacttactactattacaacgctatggacgtctggggccaagggaccacggtcaccgtctcctca

SEQ ID NO: 12021 - DNA, 372 bp, Homo sapiens; identical to SEQ ID NO: 12020

SEQ ID NO: 12022 - DNA, 372 bp, Homo sapiens; identical to SEQ ID NO: 12020

SEQ ID NO: 12023 - DNA, 372 bp, Homo sapiens
gaggtgcagctggtggagtctggaggaggcgtgatgcagccgggggggtccctgagactctcctgtgcagcctctgggttcatcgtcagtaacacctacatgacctgggtccgccaggctccagggaagggcctggagtgggtctcaattatttttaccggtggtgccacaaactacgcagactccgtgaagggccgattcaccatctccagagacaattccaagaacacggtgtattttcaaatgaacagcctgagagccgaggacacggccgtgtattactgtgcgagagtggggaaagatgactacacttactactattacaacgctatggacgtctggggccaagggaccacggtcaccgtctcctca

SEQ ID NO: 12024 - DNA, 372 bp, Homo sapiens; identical to SEQ ID NO: 12020

SEQ ID NO: 12025 - DNA, 385 bp, Homo sapiens
caggtgcagctgcaggagtcgggcccaggactggtgaagccttcggagaccctgtccctcacctgcactgtctctggtggctccatcagtagttactactggagctggatccggcagcccccagggaagggactggagtggattgggtatatctattacagtgggagcaccaactacaacccctccctcaagagtcgagtcaccatatcagtagacacgtccaagaaccagttctccctgaagctgagctctgtgaccgctgcggacacggccgtatattactgtgcgagaggagggggggggttgattttgactggttattatggggactccacttccctctttgactactggggccagggaaccctggtcaccgtctcctcag

SEQ ID NO: 12026 - DNA, 385 bp, Homo sapiens
caggtgcagctgcaggagtcgggcccaggactggtgaagccttcggagaccctgtccctcacctgcactgtctctggtggctccatcagtagttactactggagctggatccggcagcccccagggaagggactggagtggattgggtatatctattacagtgggagcaccaactacaacccctccctcaagagtcgagtcaccatatcagtagacacgtccaagaaccagttctccctgaagctgagctctgtgaccgctgcggacacggccgtgtattactgtgcgagaggagggggggggttgattttgactggttattatggggactccacttccctctttgactactggggccagggaaccctggtcaccgtctcctcag

SEQ ID NO: 12027 - DNA, 385 bp, Homo sapiens
caggtgcagctgcaggagtcgggcccaggactggtgaagccttcggagaccctgtccctcacctgcactgtctctggtggctccatcagtagttactactggagctggatccggcagcccccagggaagggactggagtggattgggtatatctattacagtgggagcaccaactataacccctccctcaagagtcgagtcaccatatcagtagacacgtccaagaaccagttctccctgaagctgagctctgtgaccgctgcggacacggccgtgtattactgtgcgagaggagggggggggttgattttgactggttattatggggactccacttccctctttgactactggggccagggaattctggtcaccgtctcctcag

SEQ ID NO: 12028 - DNA, 385 bp, Homo sapiens
caggtgcagctgcaggagtcgggcccaggactggtgaagccttcggagaccctgtccctcacctgcactgtctctggtggctccatcagtagttactactggagctggatccggcagcccccagggaagggactggagtggattgggtatatctattacagtgggagcaccaactacaacccctccctcaagagtcgagtcaccatatcagtagacacgtccaagaaccagttctccctgaagctgaggtctgtgaccgctgcggacacggccgtatattactgtgcgagaggagggggggggttgattttgactggttattatggggactccacttccctctttgactactggggccagggaaccctggtcaccgtctcctcag

SEQ ID NO: 12029 - DNA, 385 bp, Homo sapiens; identical to SEQ ID NO: 12026

SEQ ID NO: 12030 - DNA, 364 bp, Homo sapiens
gaggtgcagctgttggagtctgggggcggcttggtaccgcggggggggtccctgagactctcctgtgtagcctctggattcacgtttagcaactctgccatgaactgggtccgccaggctccagggaaggggctggagtgggtctcagctcttagtggtggtggtggtagcacatactacgcagactccgtgaagggccggttcaccatctccagagacaattccaagaacacgctgtatttggaagtgagcagcctgagaactgaggacacggctgtgtattactgtgcaagaactaacaatgggaactacaacggctactttgactactggggccagggaaccctggtcaccgtctcctcag

SEQ ID NO: 12031 - DNA, 364 bp, Homo sapiens
gaggtgcagctgttggagtctgggggaggcttggtacagcctggggggtccctgagactctcctgtgcagcctctggattcacctttagcagctatgccatgaactgggtccgccaggctccagggaaggggctggagtgggtctcagctattagtggtaatggtggtaacacaaactacgcagactccgtgaagggccggttcaccatctccagagacaattccaagaacacgctgtatttggaagtgagcagcctgagaactgaggacacggctgtgtattactgtgcaagaactaacaatgggaactacaacggctactttgactactggggccagggaaccctggtcaccgtctcctcag

SEQ ID NO: 12032 - DNA, 364 bp, Homo sapiens
gaggtgcagctgttggagtctgggggaggcttggtacagcggggggggtccctgagactctcctgtgtagcctctggattcacgtttagcaactctgccatgaactgggtccgccaggctccagggaaggggctggagtgggtctcagctcttagtggtggtggtggtagcacatactacgcagactccgtgaagggccggttcaccatctccagagacaattccaagaacacgctgtatttggaagtgagcagcctgagaactgaggacacggctgtgtattactgtgcaagaactaacaatgggaactacaacggctactttgactactggggccagggaaccctggtcaccgtctcctcag

SEQ ID NO: 12033 - DNA, 362 bp, Homo sapiens
ggtgccgctgttggagtctgggggcggcttggtaccgcggggggggtccctgagactctcctgtgtagcctctggattcacgtttagcaactctgccatgaactgggtccgccaggctccagggaaggggctggagtgggtctcagctcttagtggtggtggtggtagcacatactacgcagactccgtgaagggccggttcaccatctccagagacaattccaagaacacgctgtatttggaagtgagcagcctgagaactgaggacacggctgtgtattactgtgcaagaactaacaatgggaactacaacggctactttgactactggggccagggaaccctggtcaccgtctcctcag

SEQ ID NO: 12034 - DNA, 364 bp, Homo sapiens
gaggtgcagctgttggagtctgggggaggcttggtacagcctggggggtccctgagactctcctgtgcagcctctggattcacctttagcagctatgccatgaactgggtccgccaggctccagggaaggggctggagtgggtctcagctattagtggtagtggtggtagcacaaactacgcagactccgtgaagggccggttcaccatctccagagacaattccaagaacacgctgtatttggaagtgagcagcctgagaactgaggacacggctgtgtattactgtgcaagaactaacaatgggaactacaacggctactttgactactggggccagggaaccctggtcaccgtctcctcag

SEQ ID NO: 12035 - DNA, 358 bp, Homo sapiens
caggtgcagctgcaggagtcgggcccaggactggtgaagccttcggagaccctgtccctcacctgcactgtctctggtggctccatcagtagttactactggagctggatccggcagcccccggggaagggactggagtggattgggtatatctattccagtgggagcaccaactacaacccctccctcaagagtcgagtcaccatatcagtggacacgtccaagaaccacttctccctgaagctgacctctgtgaccgccgcagacacggccgtatatttctgtgcgagacatagccccgtggcagtggccctttttgacttctggggccagggaaccctggtcaccgtctcctcag

SEQ ID NO: 12036 - DNA, 356 bp, Homo sapiens
caggtgcagctgcaggagtcgggcccaggactggtgaagccttcggagaccctgtccctcacctgcactgtctctggtggctccatcagtagttactactggagctggatccggcagcccccggggaagggactggagtggattgggtatatctattccagtgggagcaccaactacaacccctccctcaagagtcgagtcaccatatcagtggacacgtccaagaaccacttctccctgaagctgacctctgtgaccgccgcagacacggccgtatatttctgtgcgagacatagccccgtggcagtggccctttttgacttctggggccagggaaccctggtcaccgtctcctc

SEQ ID NO: 12037 - DNA, 358 bp, Homo sapiens; identical to SEQ ID NO: 12035

SEQ ID NO: 12038 - DNA, 356 bp, Homo sapiens; identical to SEQ ID NO: 12036

SEQ ID NO: 12039 - DNA, 356 bp, Homo sapiens; identical to SEQ ID NO: 12036

SEQ ID NO: 12040 - DNA, 244 bp, Homo sapiens; identical to SEQ ID NO: 9688

SEQ ID NO: 12041 - DNA, 244 bp, Homo sapiens
agctttggcatggaatcattcctccaagtccattaacaagggctggggcctgagcagccagtcggcccggcagcagaagccacgcatcccagctctggatagtccggggagacccaaagcccaggccgggcctggcagacaccctcccagagcctccgctaggccagtcctgctgacgccgcatcggtgattcggaacagaatctgtccttctaaggtgtctccacagtcctgtcttcagcact

SEQ ID NO: 12042 - DNA, 244 bp, Homo sapiens; identical to SEQ ID NO: 9688

SEQ ID NO: 12043 - DNA, 244 bp, Homo sapiens; identical to SEQ ID NO: 9688

SEQ ID NO: 12044 - DNA, 244 bp, Homo sapiens; identical to SEQ ID NO: 9688

SEQ ID NO: 12045 - DNA, 367 bp, Homo sapiens
caggtgcagctggtgcagtctggggctgaggtgaagaagcctggggcctcagtgaaggtctcctgcaaggcttctggatacaccttcaccggctactatatgcactgggtgcgacaggcccctggacaagggcttgagtggatgggatggatcaaccctaacagtggtggcacaaactatgcacagaagtttcagggcagggtcaccatgaccagggacacgtccatcagcacagcctacatggagctgaacaggctgagatctgacgacacggccgtgtattactgtgcgagagactacggtgattacatacttttgtactactttgactactggggccagggaaccctggtcaccgtctcctcag

SEQ ID NO: 12046 - DNA, 367 bp, Homo sapiens; identical to SEQ ID NO: 11638

SEQ ID NO: 12047 - DNA, 367 bp, Homo sapiens; identical to SEQ ID NO: 11638

SEQ ID NO: 12048 - DNA, 367 bp, Homo sapiens; identical to SEQ ID NO: 11638

SEQ ID NO: 12049 - DNA, 367 bp, Homo sapiens
cagctgcagctgcaggagtcgggcccaggactggtgaagccttcggagaccctgtccctcacctgcactgtctctggtggctccatcagcagtagtggtttctactggggctggatccgccagcccccagggaaggggctggagtggattgggaatgtctattatgctgggaacacctattacaatccgtccctcgagagtcgagtcaccatatccctagacacgtccaagaaccagttctccctgaagttgagctctgtgaccgccgcagacacggctgtctattattgtgcgagaccggttaacaggtggccttactggtgcttcgatctctggggccgtggcacccttgtcactgtctcctcag

SEQ ID NO: 12050 - DNA, 367 bp, Homo sapiens
cagctgcagctgcaggagtcgggcccaggactggtgaagccttcggagaccctgtccctcacctgcactgtctctggtggctccatcagcagtagtagttactactggggctggatccgccagcccccagggaaggggctggagtggattgggaatgtctattatgctgggaacacctattacaatccgtccctcgagagtcgagtcaccatatccgtagacacgtccaagaatcagttctccctgaagttgagctctgtgaccgccgcagacacggctgtgtattattgtgcgagaccggtcaacaggtggccttactggtgcttcgatctctggggccgtggcaccctggtcactgtctcctcag

SEQ ID NO: 12051 - DNA, 367 bp, Homo sapiens
cagctgcagctgcaggagtcgggcccaggactggtgaagccttcggagaccctgtccctcacctgcactgtctctggtggctccatcagcagtagtagttactactggggctggatccgccagcccccagggaaggggctggagtggattgggaatgtctattatgctgggaacacctattacaatccgtccctcgagagtcgagtcaccatatccgtagacacgtccaagaaccagttctccctgaagttgagctctgtgaccgccgcagacacggctgtgtattattgtgcgagaccggtcaacaggtggccttactggtgcttcgatctctggggccgtggcaccctggtcactgtctcctcag

SEQ ID NO: 12052 - DNA, 367 bp, Homo sapiens; identical to SEQ ID NO: 12051

SEQ ID NO: 12053 - DNA, 370 bp, Homo sapiens
caggtgcaactggtgcagtctggggctgaggtgaagaagcctggggcctcagtgaaggtctcctgcaaggcctctggatacacgttcaccggctactatatgcactgggtgcgacaggcccctggacaagggcttgagtggatgggatggatcaaccctgccagtggtggcacaaactatggacagaagtttcagggcagggtcaccctgaccagggacacgtccatgagcacagcctatatggagctgagcagccttacatctgacgacacggccgtctattactgtgcgaaaactgaccccccttggggacacagctatggcacccttgactactggggccagggaaccctggtcaccgtctcctcag

SEQ ID NO: 12054 - DNA, 370 bp, Homo sapiens
caggtgcaactggtgcagtctggggctgaggtgaagaagcctggggcctcagtgaaggtctcctgcaaggcctctggatacacgttcaccggctactatatgcactgggtgcgacaggcccctggacaagggcttgagtggatgggatggatcaaccctgccagtggtggcacaaactatggacagaagtttcagggcagggtcaccctgaccagggacacgtccatgagcacagcctatatggagctgagcagccttagatctgacgacacggccgtctattactgtgcgaaaactgaccccccttggggacacagctatggcacccttgactactggggccagggaaccctggtcaccgtctcctcag

SEQ ID NO: 12055 - DNA, 370 bp, Homo sapiens
caggtgcaactggtgcagtctggggctgaggtgaagaagcctggggcctcagtgaaggtctcctgcaaggcctctggatacacgttcaccggctactatatgcactgggtgcgacaggcccctggacaagggcttgagtggatgggatggatcaaccctgccagtggtggcacaaactatggacagaagtttcagggcagggtcaccctgaccagggacacgtccatgaccacagcctatatggagctgagcagccttacatctgacgacacggccgtctattactgtgcgaaaactgaccccccttggggacacagctatggcacccttgactactggggccagggaaccctggtcaccgtctcctcag

SEQ ID NO: 12056 - DNA, 370 bp, Homo sapiens
caggtgcaactggtgcagtctggggctgaggtgaagaagcctggggcctcagtgagggtctcctgcaaggcctctggatacacgttcaccggctactatatacactgggtgcgacaggcccctggacaggggcttgagtggatgggatggatcaaccctgccagtggtgccacaaactatggacagaagtttcagggcagggtcaccctgaccagggacacgtccatgaccacagcctatatggagctgagcagccttacatctgacgacacggccgtctattactgtgcgaaaactgaccccccttggggacacagctatggcacccttgactactggggccagggaaccctagtcaccgtctcctcag

SEQ ID NO: 12057 - DNA, 378 bp, Homo sapiens
cagcagcagctgcaggagtcgggcccaggactggtgaagccttcggagaccctgtccctcacttgcagtgtctctggtggctccatgagtagtaccagttactcctgggcctggattcgccagcccccagggaaggggctggagtggattgggagtatttattatagtggcagcatctactacagcccgtccctcacgagtcgagtcaccatatccgtagacaggtccaagaaccagttctccctgaagctgagctctgtgaccgccgcagacacggctgtgtattactgtgcgagagcgaaacgcggtagtagtggccgttactacgactattacatggacgtctggggcacagggaccacggtcaccgtctcctca

SEQ ID NO: 12058 - DNA, 378 bp, Homo sapiens; identical to SEQ ID NO: 12057

SEQ ID NO: 12059 - DNA, 378 bp, Homo sapiens
cagctgcagctgcaggagtcgggcccaggactggtgaagccttcggagaccctgtccctcacttgcagtgtctctggtggctccatgagtagtaccacttactcctgggcctggattcgccagcccccagggaaggggctggagtggattgggagtatttattatagtggcagcatctactacagcccgtccctcacgagtcgagtcaccatatccgtagacaggtccaagaaccagttctccctgaagctgagctctgtgaccgccgcagacacggctgtgtattactgtgcgagagcgaaacgcggtagtagtggccgttactacgactattacatggacgtctggggcacagggaccacggtcaccgtctcctca

SEQ ID NO: 12060 - DNA, 367 bp, Homo sapiens
caggtgcagctggtgcagtctggggctgaggtgaagaagcctggggcctcagtgaaggtctcctgcaagtcttctggatacaccttcaccggctactatatggtctgggtgcgacaggcccctggacaagggcttgagtggatgggatggatcaaccctaacagtggtggcacaaactatgcacagaagtttcagggcagggtcaccatgaccagggacacgtccatcagcacagcctacatggagctgagcaggctgagatctgacgacacggccgtgtattactgtgccagaggatatgattacgtttgggggagttaccaggggggctactggggccagggaaccctggtcaccgtctcctcag

SEQ ID NO: 12061 - DNA, 367 bp, Homo sapiens; identical to SEQ ID NO: 12060

SEQ ID NO: 12062 - DNA, 367 bp, Homo sapiens; identical to SEQ ID NO: 12060

SEQ ID NO: 12063 - DNA, 370 bp, Homo sapiens
cagatcaccttgaaggagtctggtcctacgctggtgaaacccacacagaccctcacgctgacctgcaccttctctggattctcattcagtattaatgcagtgggtgtgggctggatccgtcagaccccaggaaaggccctggagtggcttgcactcatttattggaatgatgataagcgctacagcccatctctgaagaacaggctcaccatcaccaaggacacctccaaaaaccaggtggtccttgcaatgaccaatatggactctgtggacacagccacatattactgtgcacacaccagtcactatgaaagtagtggttgcgcctttgactactggggccagggaaccccggtcaccgtctcctcag

SEQ ID NO: 12064 - DNA, 370 bp, Homo sapiens
cagatcaccttgaaggagtctggtcctacgctggtgaaacccacacagaccctcacgctgacctgcaccttctctgggttctcattcagtattaatgcagtgggtgtgggctggatccgtcagaccccaggaaaggccctggagtggcttgcactcatttattggaatgatgataagcgctacagcccatctctgaagagcaggctcaccatcaccaaggacacctccaaaaaccaggtggtccttgcaatgaccaatatggactctgtggacacagccacatattactgtgcacacaccactcactatgaaagtagtggttgcgcctttgactactggggccagggaaccccggtcaccgtctcctcag

SEQ ID NO: 12065 - DNA, 370 bp, Homo sapiens; identical to SEQ ID NO: 12064

SEQ ID NO: 12066 - DNA, 361 bp, Homo sapiens
caggtgcagttggtgcagtctggggctgaggtgaagcagcctggggcctcagtgaaggtctcctgcagggcttctggatacaccttcaccggctactatgtgcactgggtgcgacaggcccctggacaagggcctgagtggatgggatggatcaaccctaacagtggtggcacagtctttgcacagaagtttaagggcagggtcaccatgaccagggacacgcccatcagcacagcctacatggagctgagcaggctgagatctgacgacacggccatgtattactgtgcgagagagaattattacgagtttgcgggctttgactactggggccagggaaccctggtcaccgtctcctcag

SEQ ID NO: 12067 - DNA, 361 bp, Homo sapiens; identical to SEQ ID NO: 12066

SEQ ID NO: 12068 - DNA, 361 bp, Homo sapiens
caggtgcaattggtgcagtctggggctgaggtgaagcagcctggggcctcagtgaaggtctcctgcagggcttctggatacaccttcaccggctactatgtgcactgggtgcgacaggcccctggacaagggcctgagtggatgggatggatcaaccctaacagtggtggcacagtcttggcacagaactttaagggcagggtcaccatgaccagggacacgcccatcaccacaacctacatggagctgagcaggctgagattagacgacacggccatgtactactgtgcgagagagaattattacgagtttgcgggctttgactactggggccagggaaccctggtcaccgtctcctcag

SEQ ID NO: 12069 - DNA, 352 bp, Homo sapiens
gaggtgcagctggtggagtctgggggaggcttggtacagcctggggggtccctgagactctcctgtacagcctctggattcacctttagcacctatgccatgagctgggtccgccaggctccagggaaggggctggagtgggtctcagctattagtggtactggtgatgacacatactacgcatcctccgtgaagggccggttcaccatctccagagacaattccaagaacacgctatatctgcagctgaacagcctgagagccgaccatacggccgtttattactgtgtgaggggtgccaagggtacttttgatatctggggccaagggacagtggtcaccgtctcttcag

SEQ ID NO: 12070 - DNA, 352 bp, Homo sapiens; identical to SEQ ID NO: 12069

SEQ ID NO: 12071 - DNA, 352 bp, Homo sapiens; identical to SEQ ID NO: 12069

SEQ ID NO: 12072 - DNA, 376 bp, Homo sapiens
caggtccagctggtgcagtctggggctgaggtgaagaagcctgggtcctcggtgaaggtctcctgcaaggcttctggaggcaccttcagcagctatgctatcagctgggtgcgacaggcccctggacaagggcttgagtggatgggaaggatcatccctatccttggtatagcaaactacgcacagaagttccagggcagagtcacgattaccgcggacaaatccacgagcacagcctacatggagctgagcagcctgagatctgaggacacggccgtgtattactgtgcgagagatcactacgatttttggagtggttacctcggggatgcttttgatatctggggccaagggacaatggtcaccgtctcttcag

SEQ ID NO: 12073 - DNA, 376 bp, Homo sapiens
caggtgcagctggtgcagtctggggctgaggtgaagaagcctgggtcctcggtgaaggtctcctgcaaggcttctggaggcaccttcagcagctatgctatcagctgggtgcgacaggcccctggacaagggcttgagtggatgggagggatcatccctatctttggtacagcaaactacgcacagaagttccagggcagagtcacgattaccgcggacgaattcatgagcacagcctacatggagctgagcagcctgagatctgaggacacggccgtgtattactgtgcgagagatcactacgatttttggagtggttacctcggggatgcttttgatatctggggccaagggacaatggtcaccgtctcttcag

SEQ ID NO: 12074 - DNA, 373 bp, Homo sapiens
caggtgcaggtacagcagtggggcgcaggactgttgaagccttcggagaccctgtccctcacctgcgctgtctctggtgggtccttcagtggttactactggagctggatccgccagcccccagggaaggggctggagtggattggggaaatcaatgatagtggaagcaccaactacaacccgtccctcaagagtcgagtgaccttatcactagacacgttcaagaaccagttctccctgaagctgagctctgtgaccgccgcggacacggctgtgtattactgtgcgagaggccgtgatagtagtggttattactactacactgaatacttccagcactggggccagggcaccctggtcaccgtctcctcag

SEQ ID NO: 12075 - DNA, 373 bp, Homo sapiens; identical to SEQ ID NO: 12074

SEQ ID NO: 12076 - DNA, 373 bp, Homo sapiens
caggtgcagctgcaggagtcgggcccaggactggtgaagccttcggagaccctgtccctcacctgcactgtctctggtgactccctcagtagttactactggagctggatccgccagcccccggggaagggactggagtggatcgggtttatctattacagtgggaggcccaactacagcccctccctcaagagtcgagccaccatttcaatagacccgtccaagagccagttctccctgcacctgagctctgtgaccgccgcagacacggctgtgtattactgtgcgagacgtattcctggtggcaattactatgatagtagtggtccctttgactactggggccagggaaccctggtcaccgtctcctcag

SEQ ID NO: 12077 - DNA, 373 bp, Homo sapiens
caggtgcagctgcaggagtcgggcccaggactggtgaggccttcggagaccctgtccctcacctgcactgtctctggtcgctccatcagtagtgactactggagctggatccggcagccccccgggaagggactggagtggattgggtatatctatcacagtgggggtaccagttacaacccctccctcaagagtcgagtcaccatatcagtagacacgtccaagaaccagttctccctgaagctgagctctgtgaccgccgcagacacggctgtgtattactgtgcgagacgtattcctggtggcaattactatgatagtagtggtccctttgactactggggccagggaaccctggtcaccgtctcctcag

SEQ ID NO: 12078 - DNA, 373 bp, Homo sapiens
gaagtgcagctggtggagtctgggggggacttggtacagcctggcgggtccctgagactgtcctgtgcagcctctggattcacctttgatgattttgccatgcactgggtccggcaaactccagggaagggcctggagtgggtctcagctattaattggaatagtgataggatagtatatgcggactctgtgaagggccgattcaccatgtccagagacaacgccaagaactctctgtatctgcaaatgaacagtctgagagctgaggacacggccttgtattactgtgtaaaagggtattattatgcttcggggagtttcgggaactggttcgacccctggggccagggaaccctggtcaccgtctcctcag

SEQ ID NO: 12079 - DNA, 373 bp, Homo sapiens
gaagtgcagctggtggagtctgggggagacttggtacagcctggcgggtccctgagactgtcctgtgcagcctctggattcacctttgatgattatgccatgcactgggtccggcaaactccagggaagggcctggagtgggtctcagctattaattggaatagtgataggatagtatatgcggactctgtgaagggccgattcaccatgtccagagacaacgccaagaactctctgtatctgcaaatgaacagtctgagagctgaggacacggccttgtattactgtgtaaaagggtattactatgcttcggggagtttcgggaactggttcgacccctggggccagggaaccctggtcaccgtctcctcag

SEQ ID NO: 12080 - DNA, 104 bp, Homo sapiens
tgagcatccagccacatctgtggacacagccagcgaggcagagcagggctctgctaaggacagacggccatcaaggcagggcctgggccgggccagggctccct

SEQ ID NO: 12081 - DNA, 92 bp, Homo sapiens
gacatctgtggacacagccagcgaggcagagcagggctctgctaacgacagacggccatcaaggcagggcctgggccgggccagggctccct

SEQ ID NO: 12082 - DNA, 370 bp, Homo sapiens
caggtcaccttgagggagtctggtcctgcgctggtgaaacccacacagaccctcacactgacctgcaccttctctgggttctcactcagcactagtggaatgtgtgtgacctggatccgtcagcccccagggaaggccctggagtggcttgcacgcattgattgggataatgataaatactacagcacatctctgaagaccaggctcaccgtctccaaggacacctccaaaaaccaggtggtccttacaatgaccaacatggaccctgtggacacagccacgtattactgtgcacggatgggtgtcggagtatccaatttttactactttgactactggggccagggaaccctggtcaccgtctcctcag

SEQ ID NO: 12083 - DNA, 370 bp, Homo sapiens
caggtcaccttgagggagtctggtcctgcgctggtgaaacccacacagaccctcacactgacctgcaccttctctgggttctcactcagcactagtggaatgtgtgtgacctggatccgtcagcccccagggaaggccctggagtggcttgcgcgcattgattgggataatgataagtactacaccacatctctgaagaccaggctcgccatctccaaggacacctccagaaaccaggtggtccttacaatgaccaacatggaccctgcggacacagccacgtattactgtgcacggatgggtgtcggggtatccaatttttactactttgactactggggccagggaatcctggtcaccgtctcctcag

SEQ ID NO: 12084 - DNA, 367 bp, Homo sapiens
caggtacatctggtgcagtctggggctgaggtgaagaagcctggggcctcagtgaaggtctcctgcaaggcttctggatacaccttcaccggctactatatgcactgggtgcgacaggcccctggacaagggcttgagtggatgggatggatcaaccctaacagtggtggcgcacactttgcacagaaatttcagggcagtgtcaccatgaccagggacccgtccatcagcacagcctacatggaactgaacagcctaagatctgacgacacggccgtgtattactgtgcgagagactacggtgactacaaggttttgtactcctttgactactggggccagggaaccctggtcaccgtctcctcag

SEQ ID NO: 12085 - DNA, 367 bp, Homo sapiens; identical to SEQ ID NO: 12084

SEQ ID NO: 12086 - DNA, 361 bp, Homo sapiens
gaggtgcagctggtggagtctggaggaggcgtgatgcagccgggggggtccctgagactctcctgtgcagcctctgggttcaccgtcagtaacacctacatgacctgggtccgccaggctccagggaagggcctggagtgggtctcaattatttttaccggtggtgccacaaactacgcagactccgtgaagggccgattcaccatctccagagacaattccaagaacacgctgtatttggaagtgagcagcctgagaactgaggacacggctgtgtattactgtgcaagaactaacaatgggaactacaacggctactttgactactggggccagggaaccctggtcaccgtctcctcag

SEQ ID NO: 12087 - DNA, 361 bp, Homo sapiens
gaggtgcagctggtggagtctggaggaggcgtgatgcagccgggggggtccctgagactctcctgtgcagcctctgggttcatcgtcagtaacacctacatgacctgggtccgccaggctccagggaagggcctggagtgggtctcaattatttttaccggtggtgccacaaactacgcagactccgtgaagggccgattcaccatctccagagacaattccaagaacacgctgtatttggaagtgagcagcctgagaactgaggacacggctgtgtattactgtgcaagaactaacaatgggaactacaacggctactttgactactggggccagggaaccctggtcaccgtctcctcag

SEQ ID NO: 12088 - DNA, 364 bp, Homo sapiens
gaggtgcagctggtggagtctgggggaggcttagtacagcctggagggtccctgagactctcctgtgcagcctctggattcacctttagcacctatgccatgagctgggtccgccaggctccagggaaggggctggagtgggtctcaggtattagtggtggtgctggtagcacatactacgcagactccgtgaagggccggttcaccatctccacagacaagtccaagaacacgctatatctgcaaatgaacagcctgagagccgaggacacggccgtatattactgtgcgaaagatgtctacggtgggagaccctactactttgactactggggccagggaaccctggtcaccgtctcctcag

SEQ ID NO: 12089 - DNA, 364 bp, Homo sapiens; identical to SEQ ID NO: 12088

SEQ ID NO: 12090 - DNA, 363 bp, Homo sapiens
gaggtgcagctggtggagtctgggggaggcttggtacagcctggagggtccctgagactctcctgtgcagcctctggattcaccttcagtagttatgaaatgaactgggtccgccaggctccagggaaggggctggagtgggtttcatacattagtagtagtggtagtaccatatactacgcagactctgtgaagggccgattcaccatctccagagacaacgccaagaagtcactctttctgcaaatgaacagcctgagagccgatgacacgggtgtttattactgtgcgagggtaatagagcccttctactactacggtatggacgtctggggccaagggaccacggtcaccgtctcctca

SEQ ID NO: 12091 - DNA, 363 bp, Homo sapiens; identical to SEQ ID NO: 12090

SEQ ID NO: 12092 - DNA, 367 bp, Homo sapiens
cagctgcagctgcaggagtcgggcccaggactggtgaagtcttcggagaccctgtccctcacctgcactgtctctggtggctccatcagcagtacgaattattactggggctggatccgccagcccccagggaagggcctggagtgggttgcgaatatctattatagtgggagcacctactacaacccgcccctcaagagtcgagtcaccatatccgtagacacgtccaagaatcagttctccctgaagctgagctctgtgaccgccgcagacacggctgtctattactgtgcgagaagtgtcttgacgtggccacatgatacttttgatatctggggccaagggacaatggtcaccgtctcttcag

SEQ ID NO: 12093 - DNA, 367 bp, Homo sapiens; identical to SEQ ID NO: 12092

SEQ ID NO: 12094 - DNA, 394 bp, Homo sapiens
caggtgcagttggtgcagtctggggctgaggtgaagcagcctggggcctcagtgaaggtctcctgcagggcttctggatacaccttcaccggctactatgtgcactgggtgcgacaggcccctggacaagggcctgagtggatgggatggatcaaccctaacagtggtggcacagtctttgcacagaagtttaagggcagggtcaccatgaccagggacacgcccatcaccacagcctacatggagctgagcaggctgagatctgacgacacggccatttattactgtgcgagaggggcggggatggttcggggactttttataaccacttttattgggctcgactgctacttcgatctctggggccgtggcaccctggtcactgtctcctcag

SEQ ID NO: 12095 - DNA, 394 bp, Homo sapiens
caggtgcagatggtgcagtctggggctgaggtgaagaagcctggggcctcagtgaaggtctcctgcaagccttctggatacactttcaccgactattatttacactgggtgcgacaggcccctggacaagggcttgagtggatgggatggatcaaccctaaaagtggtggcacaaactatgcacagaagtttcagggctgggtcaccatgaccagggacacgtccatcagtacagcctacatggagctgagcaggctgagatctgacgacacggccatttattactgtgcgagaggggcggggatggttcggggactttttataaccacttttattgggctcgactgctacttcgatctctggggccgtggcaccctggtcactgtctcctcag

SEQ ID NO: 12096 - DNA, 378 bp, Homo sapiens
caggtccagcttgtgcagtctggggctgaggtgaagaagcctggggcctcactgaaggtctcctgcaaggcttctggatacagcttcactacctatgctatgcattgggtgcgccaggcccccggacaaaggcttgagtggatgggatggatcaacactggcaatggtaacacaaaatattcacagaagttccagggcagagtcaccattaccagggacacatccgcgaacacagcctacatggagctgagcagcctgagatctgaagacacggctgtgtattactgtgcgagatcgtacagcagtggctggtacaatttggactactactactacatggacgtctggggcaaagggaccacggtcaccgtctcctca

SEQ ID NO: 12097 - DNA, 378 bp, Homo sapiens
caggtccagcttgtgcagtctggggctgaggtgaagaagcctggggcctcactgaaggtctcctgcaaggcttctggatacagcttcactacctatgctatgcattgggtgcgccaggcccccggacaaaggcttgagtggatggggtggatcaacactggcaatggtaacacaaaatattcacagaaattccagggcagagtcaccattaccagggacacatccgcgagcacagcctacatggagctgagcagcctgagatctgaagacacggctgtgtattactgtgcgagatcgtacagcagtggctggtacaatttggactactactactacatggacgtctggggcaaagggaccacggtcaccgtctcctca

SEQ ID NO: 12098 - DNA, 367 bp, Homo sapiens
caggtgcagctacagcagtggggcgcaggactgttgaagccttcggagaccctgtccctcacctgcgttgttaatggtgggtccctcagtggttactactggagctggatccgccagcccccagggaaggggctggagtggattggggaaatcaatcatactggaagcaccaactacaacccgtccctcaagagtcgagtcaccatatcagtagacacgtccaagaaccagttctccctgaagctgacctctgtgaccgccgcggacacggctgtgtactactgtgcgagagtaggggatacagctatgacccgggtgtactactttgactactggggccagggaaccctggtcaccgtctcctcag

SEQ ID NO: 12099 - DNA, 367 bp, Homo sapiens
caggtgcagctacagcagtggggcgcaggactgttgaagccttcggagaccctgtccctcacctgcgctgtctatggtgggtccttcagtggttactactggagttggatccgccagcccccagggaaggggctggagtggattggggaaatcaatcatagtggaagcaccagctacaacccgtccctcaagagtcgaatcaccatatcagtagacacgtccaagaaccagttctccctgaagctgacctctgtgaccgccgcggacacggctgtgtactactgtgcgagagtaggggatacagctatgacccgggtgtactactttgactactggggccagggaaccctggtcaccgtctcctcag

SEQ ID NO: 12100 - DNA, 361 bp, Homo sapiens
gaggtgcagctggtggagtctgggggaggcttggtccagcctggggggtccctgagactctcctgtgcagcctctggattcacctttagtgtctattggatgagctgggtccgccaggctccagggaaggggctggagtgggtggccaacataaagcaagatggaagtgagaaatactatgtggactctgtgaagggccgattcaccatctccagagacaacgccaagaactcactgtatctgcaaatgaacagcctgagagccgaggacacggccgtgtattactgtgcgagggaggggatagcagtggctggtgggctggactactggggccagggaaccctggtcaccgtctcctcag

SEQ ID NO: 12101 - DNA, 361 bp, Homo sapiens
gaggtgcagctggtggagtctgggggaggcttggtccagcctggggggtccctgagactctcctgtgcagcctctggattcacctttagtagctattggatgagctgggtccgccaggctccagggaaggggctggagtgggtggccaacataaagcaagatggaagtgagaaatactatgtggactctgtgaagggccgattcaccatctccagagacaacgccaagaactcactgtatctgcaaatgaacagcctgagagccgaggacacggccgtgtattactgtgcgagagaggggatagcagtggctggtggcattgactactggggccagggaaccctggtcaccgtctcctcag

SEQ ID NO: 12102 - DNA, 367 bp, Homo sapiens
caggtgcagctgcaggagtcgggcccagggctggtgaagccttcggagaccctgtccctcacctgcactgtctctggtggctccatcagtagttactactggagctggatccggcagcccccagggaagggactggagtggattgggtatatctattacagtgggagctccaactacaacccctccctcaagagtcgagtcgccatatcagtagacacgtccaagaaccagttctccctgaagctgagctctgtgaccgctgcggacacggccgtgtattactgtgcgagagaacccgggtatagcagcagctggtggtactactttgactactggggccagggaaccctggtcaccgtctcctcag

SEQ ID NO: 12103 - DNA, 367 bp, Homo sapiens
caggtgcagctgcaggagtcgggcccaggactggtgaggccttcggagaccctgtccctcacctgcactgtctctggtcgctccatcagtagtgactactggagctggatccggcagccccccgggaagggactggagtggattgggtatatctatcacagtgggggtaccagttacaacccctccctcaagagtcgagtcaccatatcagtagacacgtccaagaaccagttctccctgaagttgagctctgtgaccgctgcggacacggccgtgtattactgtgcgagagaacccgggtatagcagcagctggtggtactactttgactactggggccagggaaccctggtcaccgtctcctcag

SEQ ID NO: 12104 - DNA, 358 bp, Homo sapiens
caggtgcagctgcaggagtcgggcccaggactggtgaagccttcggagaccctgtccctcacctgcactgtctctgggggctccatcagtagtcactactggagctggatccggcagcccccagggaagggactggagtggattgggtatatcttttacagtgggagcaccaactacaacccctccctcaagagtcgagtcaccatatcagtcgacacgtccaagagccacttctccctgaaggtgagctctgtgaccactgcggacacggccgtgtattactgtgcgagagtccctaataccagctcgtactactttgactactggggccagggaatcctggtcaccgtctcctcag

SEQ ID NO: 12105 - DNA, 358 bp, Homo sapiens
caggtgcagctgcaggagtcgggcccaggactggtgaagccttcggagaccctgtccctcacctgcactgtctctggtggctccatcagtagttactactggagttggatccggcagcccccagggaagggactggagtggattgggtatatcttttacagtgggagcaccaactacaacccctccctcaagagtcgagtcaccatatcagtcgacacgtccaagagccacttctccctgaaggtgagctctgtgaccactgcggacacggccgtgtattactgtgcgagagtccctaataccagctcgtactactttgactactggggccagggaatcctggtcaccgtctcctcag

SEQ ID NO: 12106 - DNA, 358 bp, Homo sapiens
caggtgcagctgcaggagtcgggcccaggactggtgaagccttcggagaccctgtccctcacctgcactgtctctggtgactccgtcagcagtgctaattactactggagctggatccggcagcccccagggaagggactggagtggattggctatatctattacagtgggagcaccaactacaacccctccctcaagcgtcgagtcaccatatcagtagacacgtccaagaaccagttctccctgaagctgacctctgtgaccgctgcggacacggccgtgtattactgtgcgagaagggccctactacgccctttcgatctctggggccgtggcaccctggtcactgtctcctcag

SEQ ID NO: 12107 - DNA, 358 bp, Homo sapiens; identical to SEQ ID NO: 12106

SEQ ID NO: 12108 - DNA, 381 bp, Homo sapiens
caggtgcagctgcaggagtcgggcccaggactggtgaagccttcggagaccctgtccctcacctgcactgtctctggtggctccatcagtagttactactggagctggatccggcagcccccagggaagggactggagtggattgggtatatctattacagtgggagcaccaactacaacccctccctcaagagtcgagtcaccatatcagtagacacgtccaagaaccagttctccctgaaactgagctctgtgaccgctgcggacacggccgtgtattactgtgcgagaggaggaaatcatgatagtagtggttattactaccgaccctactactacatggacgtctggggcaaagggaccacggtcaccgtctcctca

SEQ ID NO: 12109 - DNA, 381 bp, Homo sapiens
caggtgcagctgcaggagtcgggcccaggactggtgaagccttcggagaccctgtccctcacctgcactgtctctggtggctccatcagtagttactactggagctggatccggcagcccccagggaagggactggagtggattgggtatatctattacagtgggagcaccaactacaacccctccctcaagagtcgagtcaccatgtcagtagacacgtccaagaaccagttctccctgaaactgagctctgtgaccgctgcggacacggccgtgtattactgtgcgagaggaggaaatcatgatagtagtggttattactaccgaccctactactacatggacgtctggggcaaagggaccacggtcaccgtctcctca

SEQ ID NO: 12110 - DNA, 376 bp, Homo sapiens
caggtgcagctggtgcaatctggggctgaggtgaagaggcctggggcctccgttcaggtttcctgcaaggccgctgggcacaccttcagcaactcctatatgcactgggtgcggcaggcccctggacaagggcttgagtggatgggaagtgtcaacccgaaaggagacaaatcaactctcgcacagaagttccagggcagagtcaccataacaagggacacgtccacgagcactctgtccctggagctgcgcagcctgagactcgaggacacggccgtctatttctgtgcgagcccctacaacgctgctgatgtagggatgcctggggatcctcttgaggtgtggggccaaggcacactggtcaccgtctcctcag

SEQ ID NO: 12111 - DNA, 376 bp, Homo sapiens
gaggtgcagctgttggagtctgggggaggcttggtacagcctggggggtccctgagactctcctgtgcagcctctggattcacctttagcagctatgccatgagctgggtccgccaggctccagggaaggggctggagtgggtctcagctattagtggtagtggtggtagcacatactacgcagactccgtgaagggccggttcaccatctccagagacaattccaagaacacgctgtatctgcaaatgaacagcctgagagccgaggacacggccgtgtattactgtgcgaggtcgtattactatgatagtagtggttattactacgatgcttttgatatctggggccaagggacaatggtcaccgtctcttcag

SEQ ID NO: 12112 - DNA, 375 bp, Homo sapiens
caggtgcagctggtggagtctgggggaggcttggtcaagcctggagggtccctgagactctcctgtgcagcctctggattcaccttcagtgactactacatgagctggatccgccaggctccagggaaggggctggagtgggtttcatacattagtagtagtggtagtaccatatactacgcagactctgtgaagggccgattcaccatctccagggacaacgccaagaactcactgtatctgcaaatgaacagcctgagagccgaggacacggccgtgtattactgtgcgagaggggggggtatagcagaatattactactactactacggtatggacgtctggggccaagggaccacggtcaccgtctcctca

SEQ ID NO: 12113 - DNA, 367 bp, Homo sapiens
ctggtggagtctgggggaggcttggtccagcctggggggtccctgagactctcctgtgcagcctctggattcaccttcagtagctatggcatgcactgggtccgccaggctccaggcaaggggctggactgggtggcaattatatcatatgatggaagtaataaatactacgcagactccgtgaagggccgattcaccatctccagagacaacgccaagaactcactgtatctgcaaatgaacagcctgagagccgaggacacggccgtgtattactgtgcgaggtcgtattactatgatagtagtggttattactacgatgcttttgatatctggggccaagggacaatggtcaccgtctcttcag

SEQ ID NO: 12114 - DNA, 372 bp, Homo sapiens
caggtgcagctacagcagtggggcgcaggactgttgaagccttcggagaccctgtccctcacctgcgctgtctctggagggtccttcagtggttactactggagctggatccgccagcccccaggtaaggggctggagtggattggggaaatcaatcatagtggaagcaccaactacaacccgtccctcaagagtcgagtcaccatatcagtagacacgcccaagaaccagttctccctgaagctgacctctgtgaccgccgcagacacggctgtatattattgtgcgagatgccactacggtgaagggggatactactactactattacatggacgtctggggcaaagggaccacggtcaccgtctcctca

SEQ ID NO: 12115 - DNA, 376 bp, Homo sapiens
gaggtgcagctggtgcagtctggagcagaggtgaaaaagcccggggagtctctgaagatctcctgtaagggttctggatacagctttaccagctactggatcggctgggtgcgccagatgcccgggaaaggcctggagtggatggggatcatctatcctggtgactctgataccagatacagcccgtccttccaaggccaggtcaccatctcagccgacaagtccatcagcaccgcctacctgcagtggagcagcctgaaggcctcggacaccgccatgtattactgtgcgagagccccggtattacgatattttgactggttcccgtactactttgactactggggccagggaaccctggtcaccgtctcctcag

SEQ ID NO: 12116 - DNA, 376 bp, Homo sapiens
caggtgcagctggtgcagtctggggctgaggtgaagaagcctgggtcctcggtgaaggtctcctgcaaggcttctggaggcaccttcagcagctatgctatcagctgggtgcgacaggcccctggacaagggcttgagtggatgggagggatcatccctatctttggtacatcaaactacgcacagaagttccagggcagagtcacgattaccgcggacgaatccacgagcacagcctacatggagctgagcagcctgagatctgaggacacggccgtttattactgtgcgagagtcccatcgtgggagctactgtcgaccgatttgggctacgttgactactggggccagggaaccctggtcaccgtctccgcag

SEQ ID NO: 12117 - DNA, 375 bp, Homo sapiens
gaggtgcagctggtggagtctgggggaggcctggtcaagcctggggggtccctgagactctcctgtgcagcctctggattcactttcagtaactataacatgaactgggtccgccaggctccagggaaggggctggagtgggtctcatccattagtagtagtagtagttacatatactacgcagactcagtgaagggccgattcaccatctccagagacaacgccaagaactcactgtatctgcaaatgaacagcctgagagccgaggacacggctgtgtattactgtgcgagagatcatcctagtggctacgacccttactactactacggtatggacgtctggggccaagggaccacggtcaccgtctcctca

SEQ ID NO: 12118 - DNA, 375 bp, Homo sapiens
caggttcagttggtgcagtctggagctgaagtgaagaagcctggggcctcagtgaaggtctcctgtaagccttctggttacacctttgacacctatggtatcagctgggtgcgacaggcccctggacaagggcttgagtggatgggagggatcagtgttcacaatggaaacacaaactatgcacacaagttccagggcagactcaccatgaccacagacacatccacgagcacagcctacatggagttgaggagcctgagatctgacgacacggccgtgtattactgtgggagaggtgtgagtggcaccgggggtctttattattactactacatggacgtctggggcaaagggaccacggtcaccgtctcctca

SEQ ID NO: 12119 - DNA, 375 bp, Homo sapiens
gaggtgcaactgttggagtctgggggaggcttggtacagcctggggggtccctgagactctcctgtgcagcctctggattcacctttagcagctatgccatgaactgggtccgccaggctccagggaaggggctggagtgggtctcagctattagtggtaatggtggtaacacaaactacgcagactccgtgaagggccggttcaccatctccagagacaattccaagaacacgctgtatctgcaaatgaacagcctgagagtcgaggacacggccgtatattactgtgcgaaagatattaagatcccagtgggagctacttactactacggtatggacgtctggggccaagggaccacggtcaccgtctcctca

SEQ ID NO: 12120 - DNA, 376 bp, Homo sapiens
caggtgcagctggtggagtctgggggaggcgtggtccagcctgggaggtccctgagactctcctgtgcagcctctggattcaccttcagtagctatggcatgcactgggtccgccaggctccaggcaaggggctggagtgggtggcagttatatggtatgatggaagtaataaatactatgcagactccgtgaagggccgattcaccatctccagagacaattccaagaacacgctgtatctgcaaatgaacagcctgagagccgaggacacggctgtgtattactgtgcgagatccacccatggctacggtggtaactccgagaactggtacttcgatctctggggccgtggcaccctggtcactgtctcctcag

SEQ ID NO: 12121 - DNA, 375 bp, Homo sapiens
gaagtgcagctggtggagtctgggggaggcttggtacagcctggcaggtccctgagactctcctgtgcagcctctggattcacctttgatgattatgccatgcactgggtccggcaagctccagggaagggcctggagtgggtctcaggtattagttggaatagtggtagcataggctatgcggactctgtgaagggccgattcaccatctccagagacaacgccaagaactccctgtatctgcaaatgaacagtctgagagctgaggacacggccttgtattactgtgcaaaagatataaggagcagcagctggtcatactactactacggtatggacgtctggggccaagggaccacggtcaccgtctcctca

SEQ ID NO: 12122 - DNA, 373 bp, Homo sapiens
caggtgcagctgcaggagtcgggcccaggactggtgaagccttcggagaccctgtccctcacctgcactgtctctggtggctccatcagtagttactactggagctggatccggcagcccccagggaagggactggagtggattgggtatatctattacagtgggagcaccaactacaacccctccctcaagagtcgagtcgccatgtcagtagacacgtccaagaaccagttctccctgaggttgaactctgtgaccgccgcagacacggccgtatattactgtgcgagacggcaatattgtggtgttggctgcttttccgggaactggttcgacccctggggccagggaatcctggtcaccgtctcctcag

SEQ ID NO: 12123 - DNA, 376 bp, Homo sapiens
cagctgcagctacaggagtcgggcccaggactggtgaagccttcggagaccctgtccctcacctgcactgtctctagtggctccatcagcagtggtacttactactggggctggatccgccagcccccagggaaggggctggagtggattgggagtatctattatagtgggagcacctactacaacccgtccctcaagagtcgagtcaccatatcagtagacaagtccaagaaccagttctccctgaagctgagttctgtgaccgccgcggacacggccgtctattactgtgcgagaggggattatgataacatttgggggagttacggctggttcgacccctggggccagggaaccctggtcaccgtctcctcag

SEQ ID NO: 12124 - DNA, 370 bp, Homo sapiens
caggtgcagctacagcagtggggcgcaggactgttgaagccttcggagaccctgtccctcacctgcgctgtctatggtgggtccttcagtggttactactggagctggatccgccagcccccagggaaggggctggagtggattggggaaatcaatcatagtggaagcaccaactacaacccgtccctcaagagtcgagtcaccatatcagtagacacgtccaagaaccagttctccctgaagctgagctctgtgaccgccgcggacacggctgtgtattactgtgcgagaaaggggattacgatttttggagtggtccaaaactggttcgacccctggggccagggaaccctggtcaccgtctcctcag

SEQ ID NO: 12125 - DNA, 373 bp, Homo sapiens
gaggtgcagctgttggagtctgggggaggcttggtacagcctggggggtccctgagactctcctgtgcagcctctggattcacctttagcagctatgccatgagctgggtccgccaggctccagggaaggggctggagtgggtctcagctattagtggtagtggtggtagcacatactacgcagactccgtgaagggccggttcaccatctccagagacaattccaagaacacgctgtatctgcaaatgaacagcctgagagccgaggacacggccgtatattactgtgcgaacttacgatttttggagtggttaccccagggcgaatggttcgacccctggggccagggaaccctggtcaccgtctcctcag

SEQ ID NO: 12126 - DNA, 372 bp, Homo sapiens
caggtgcagctggtgcagtctggggctgaggtgaagaagcctggggcctcagtgaaggtctcctgcaaggcttctggatacaccttcaccggctactatatgcactgggtgcgacaggcccctggacaagggcttgagtggatgggatggatcaaccctaacagtggtggcacaaactatgcacagaagtttcagggcagggtcaccatgaccagggacacgtccatcagcacagcctacatggagctgagcaggctgagatctgacgacacggccgtgtattactgtgcgagagatgcccgtggatcaactggatcttactactacggtatggacgtctggggccaagggaccacggtcaccgtctcctca

SEQ ID NO: 12127 - DNA, 372 bp, Homo sapiens
gaggtgcagctggtggagtccgggggaggcttagttcagcctggggggtccctgagactctcctgtgcagcctctggattcaccttcagtagctactggatgcactgggtccgccaagctccagggaaggggctggtgtgggtctcacgtattaatagtgatgggagtagcacaagctacgcggactccgtgaagggccgattcaccatctccagagacaacgccaagaacacgctgtatctgcaaatgaacagtctgagagccgaggacacggctgtgtattactgtgcaagagagtccggctacaaagggccctactactactacggtatggacgtctggggccaagggaccacggtcaccgtctcctca

SEQ ID NO: 12128 - DNA, 367 bp, Homo sapiens
gaggtgcagctggtggagtctgggggaggcttggtacagcctggagggtccctgagactctcctgtgcagcctctggattcaccttcagtagttatgaaatgaactgggtccgccaggctccagggaaggggctggagtgggtttcatacattagtagtagtggtagtaccatatactacgcagactctgtgaagggccgattcaccatctccagagacaacgccaagaactcactgtatctgcaaatgaacagcctgagagccgaggacacggctgtttattactgtgcgagagaccctacaacgtattactatgatagtagtggttacctctggggccagggaaccctggtcaccgtctcctcag

SEQ ID NO: 12129 - DNA, 373 bp, Homo sapiens
caggtgcagctgcaggagtcgggcccaggactggtgaagccttcggagaccctgtccctcacctgcactgtctctggtggctccatcagtagttactactggagctggatccggcagcccccagggaagggactggagtggattgggcatacctattacagtgggagtaccaactacaacccctccctcaagagtcgagtcaccatatcagtagacacgtccaagaaccagttctccctgaagctgagctctgtgaccgccgcagacacggctgtgtattactgtgcgagacacttctccgatagggtggtggtgactgccccgtactactttgactactggggccagggaaccctggtcaccgtctcctcag

SEQ ID NO: 12130 - DNA, 373 bp, Homo sapiens
caggtgcagctggtgcagtctggggctgaggtgaagaagcctggggcctcagtgaaggtttcctgcaaggcatctggatacaccttcaccagctactatatgcactgggtgcgacaggcccctggacaagggcttgagtggatgggaataatcaaccctagtggtggtagcacaagctacgcacagaagttccagggcagagtcaccatgaccagggacacgtccacgagcacagtctacatggagctgagcagcctgagatctgaggacacggccgtgtattactgtgcgagagaggagagtatgatagtagtggcaacggcgggtgcttttgatatctggggccaagggacaatggtcaccgtctcttcag

SEQ ID NO: 12131 - DNA, 364 bp, Homo sapiens
gaggtgcagttgctgcagtctgggggaggcttggtacagcctggggggtccctgagactctcctgtgcagcctctggattcacatttacttcttatgccatgaattgggtccgccaggttccagggaaggggctggagtgggtctcaggaattagcgatactgggactacgtggtatgcagactccgtgaagggccggttctccgtctccaggaacaatgccaacaacaccgtgtttttgcatatgagtagtctgagaagggaggacgcggccgtatattattgtgccaagggacctggaccttcctggggtttaacgtggttcgacccctggggccagggaaccctggtcaccgtctcctcag

SEQ ID NO: 12132 - DNA, 367 bp, Homo sapiens
caggtgcagctggtggagtctgggggaggcgtggtccagcctgggaggtccctgagactctcctgtgcagcctctggattcaccttcagtagctatggcatgcactgggtccgccaggctccaggcaaggggctggagtgggtggctgttatatcatatgatggaaataataaatactatgcagactccgtgaagggccgattcaccatctccagagacaattccaagaacacgctgtatctgcaaatgaacagcctgagagctgaggacacggctgtctattactgtgcgagatgtagtggtggtagctgctactcgggttggttcgacccctggggccagggaaccctggtcaccgtctcctcag

SEQ ID NO: 12133 - DNA, 364 bp, Homo sapiens
caggtgcagctgcaggagtcgggcccaggactggtgaagccttcggagaccctgtccctcacctgcactgtctctggtggctccatcagtagttactactggagctggatccggcagcccccagggaagggactggagtggattgggtatatctattacagtgggagcaccaactacaacccctccctcaagagtcgagtcaccatatcagtagacacgtccaagaaccagttctccctgaagctgagctctgtgaccgccgcagacacggccgtgtattactgtgcgagacatgtgggtgggagctactatactgactggttcgacccctggggccagggaaccctggtcaccgtctcctcag

SEQ ID NO: 12134 - DNA, 370 bp, Homo sapiens
caggtgcagctgcaggagtcgggcccaggactggtgaagccttcggagaccctgtccctcacctgcactgtctctggtggctccgtcagcagtggtagttactactggagctggatccggcagcccccagggaagggactggagtggattgggtatatctattacagtgggagcaccaactacaacccctccctcaagagtcgagtcaccatatcagtagacacgtccaagaaccagttctccctgaacctgagctctgtgaccgctgcggacacggccgtgtattactgtgcgagagataacaaagtggggtggttacacaactggttcgacccctggggacagggaaccctggtcaccgtctcctcag

SEQ ID NO: 12135 - DNA, 376 bp, Homo sapiens
caggttcagctggtgcagtctggagctgaggtgaagaagcctggggcctcagtgaaggtctcctgcaaggcttctggttacacctttaccagctatggtatcagctgggtgcgacaggcccctggacaagggcttgagtggatgggatggatcagcgcttacaatggtaacacaaactatgcacagaagctccagggcagagtcaccatgaccacagacacatccacgagcacagcctacatggagctgaggagcctgagatctgacgacacggccgtgtattactgtgcgagagatgtggacgattacgatttttggagtggttattataggtttgactactggggccagggaaccctggtcaccgtctcctcag

SEQ ID NO: 12136 - DNA, 376 bp, Homo sapiens
caggttcagctggtgcagtctggagctgaggtgaagaagcctggggcctcagtgaaggtctcctgcaaggcttctggttacacctttaccagctacggtatcagctgggtgcgacaggcccctggacaagggcttgagtggatgggatggatcagcgcttataatggtaacacaaactatgcacagaagctccagggcagagtcaccatgaccacagacacatccacgagcacagcctacatggagctgaggagcctgagatctgacgacacggccgtgtattactgtgcgagggcacgaaaggctatgaattgggggagttatcgttatgactttgactactggggccagggaaccctggtcaccgtctcctcag

SEQ ID NO: 12137 - DNA, 370 bp, Homo sapiens
cagctgcagctgcaggagtcgggcccaggactggtgaagccttcggagaccctgtccctcacctgcactgtctctggtggctccatcagcagtagtagttactactggggctggatccgccagcccccagggaaggggctggagtggattgggagtatctattatagtgggaacacctactacaagccgtccctcaagagtcgagtcaccatatccgtagacacgtccaagaaccagttctccctgaagctgagctctgtgaccgccgcagacacggctgtgtattactgtgcgaggggtagcagcagctggtatcaatatgaatacttccagcactggggccagggcaccctggtcaccgtctcctcag

SEQ ID NO: 12138 - DNA, 367 bp, Homo sapiens
caggtgcagctggtgcagtctggggctgaggtgaagaagcctggggcctcagtgaaggtttcctgcaaggcatctggatacaccttcaccagctactatatgcactgggtgcgacaggcccctggacaaggacttgagtggatggggatgatcaaccctagtggtggtagcacaagctacgcacagaagttccagggcagagtcaccatgaccagggacacgtccacgagcacagtctacatggagctgagcagcctgagatctgaggacacggccgtgtattactgtgcgagcgcccgacacttttggagtggtttcaactggttcgacccctggggccagggaaccctggtcaccgtctcctcag

SEQ ID NO: 12139 - DNA, 367 bp, Homo sapiens
caggtgcagctggtgcagtctggggctgaggtgaagaagcctggggcctcagtgaaggtctcctgcaaggcttctggatacaccttcaccggctactatatgcactgggtgcgacaggcccctggacaagggcttgagtggatgggatggatcaaccctaacagtggtgccacaaagtatacacagaagtttcagggctgggtcaccatgaccagggacacgtccatcagcacagtctatatggagctgagcaggctgagatctgacgacacggccgtgtattactgtgtgagagggtcgcggtacgactggagcgggaactggttcgacccctggggccagggaaccctggtcaccgtctcctcag

SEQ ID NO: 12140 - DNA, 367 bp, Homo sapiens
caggtccagctgctgcagtctggggctgaactgaagaagcctggggcctcagtgaacgtctcctgcaaggcctctggatacaccttcaccgccttctatatgcattgggtgcggcaggcccctggacaaggccttgagtggatgggatggatcaaccctaaaactggtggcaaagattttgcacgtaaccttcagggcagggtctccatgaccagagacacgtccatcaacacagcctacatggaactgaggggcctaagatctgacgacacggccatatattactgtgcgatagagatggtgaaaaatgggatctggatgtggctcgacccctggggccagggaaccctggtcaccgtctcctcag

SEQ ID NO: 12141 - DNA, 367 bp, Homo sapiens
caggtgcagctggtgcagtctggggctgaggtgaagaagcctggggcctcagtgaaggtctcctgcaaggcttctggatacaccttcaccgactactatatacactgggtgcgacaggcccctggacaaggccttgagtggatgggatggatcaaccctaaaactggtggcacagactttgcacagaggtttcagggcagggtcaccatgaccagggacacgtccatcaacacagcctacatggacctgagtaagctgacatctgacgacacggccatatattactgtgcgagagagttagtgggaactggaatctggatgtgcctcgacccctggggccagggaacgctggtcaccgtctcctcag

SEQ ID NO: 12142 - DNA, 365 bp, Homo sapiens
caggtccagctgctgcagtctggggctgagctgaagaagcctggggcctcagtgaacgtctcctgcaaggcctctggatacaccttcagcgccttctatatgcactgggtgcgacaggcccctggacaaggccttgagtacttgggatggatcaaccctaaaactggtggcacagattttgcgtggaactttcagggcagggtcaccatgaccagagacacgtccatcaacacagtctacatggaactgaggggcctgagatctgacgacacggccatatattactgtgcgagagagatagtgggaaatgggatctggatgtggctcgacccctggggccagggaacgctggtcaccgtctcctc

SEQ ID NO: 12143 - DNA, 367 bp, Homo sapiens
caggtccagttggtacagtctggggctgaggtgaggaagcctggggcctcagtgaaggtctcctgcaaggtttccggatacaccctcattgaattatccatgcactgggtgcgacaggctcctggaaaagggcttgagtggatgggaggctttgatcctgaggatgttgaaacaatctacgcacagaagttccagggcagagtcaccatgaccgaggacacatctacagacacagcctacttggaactgagcagcctgagatctgaggacacggccgtatattactgtgtaacaacatatgcggttcttggggtggtcacacccccgctctactggggccagggaaccctggtcaccgtctcctcag

SEQ ID NO: 12144 - DNA, 367 bp, Homo sapiens
cagattcaactggtgcagtctggagctgaggtgaaggagcctggggcctcagtgaaggtctcctgcacggcctctggttacacctttacctcctttgggatcacgtgggtgcgacaggcccctggacaagggcttgagtggttggggtggatcagcactaggagtggtaacacaaactatgcacagaacctccagtatagaattaccatgaccacagacacattcacgaacacagcctacatggagttgaggaacctgagatctgacgacacggccatctattactgtgcgagagatggagtaggcagtgcctggcaactagtcagtgactactggggccagggaaccccggtcaccgtctcctcag

SEQ ID NO: 12145 - DNA, 364 bp, Homo sapiens
gaggtgcatctgttggagtctgggggaggcttggtacagcctggggggtccctgagactctcctgtgcagcctctggattcacctttagcagctatgccatgagctgggtccgccaggctccagggaagggactggagtgggtctcagctattagcggtagtggtagtagcacatacgcagactccgtgaagggccggttcaccgtctccagagacaattccaagaacacgctgtatctgcaaatgaacagcctgagagccgaggacacggccgtatattactgtgcgaaagatctgctttactacggttcggggaccttttttgactactggggccagggaaccctggtcaccgtctcctcag

SEQ ID NO: 12146 - DNA, 373 bp, Homo sapiens
caggtgcagctgcaggagtcgggcccaggactggtgaagccttcggggaccctgtccctcacctgcgctgtctctggtggctccatcagcagtagtaactggtggagttgggtccgccagcccccagggaaggggctggagtggattggggaaatctatcatagtgggagcaccaactacaacccgtccctcaagagtcgagtcaccatatcagtagacaagtccaagaaccagttctccctgaagctgagctctgtgaccgccgcggacacggccgtgtattactgtgcgagagatctagacttagcagcagctggtacgggcggatggttcgacccctggggccagggaaccctggtcaccgtctcctcag

SEQ ID NO: 12147 - DNA, 373 bp, Homo sapiens
caggtgcagctgcaggagtcgggcccaggactggtgaagccttcggggaccctgtccctcacctgcgctgtctctggtggctccatcagcagtagtaactggtggagttgggtccgccagcccccagggaaggggctggagtggattggggaaatctatcatagtgggagcaccaactacaacccgtccctcaagagtcgagtcaccatatcagtagacaagtccaagaaccagttctccctgaagctgagctctgtgaccgccgcggacacggccgtgtattactgtgcgagctcccgcccggtggctacagtaactaagaggggctggttcgacccctggggccagggaaccctggtcaccgtctcctcag

SEQ ID NO: 12148 - DNA, 370 bp, Homo sapiens
caggtcaccttgaaggagtctggtcctgcactggtgaaacccacacagaccctcatgctgacctgcaccttctctgggttctcactcagcactgctggaatgggtgtgggttagatctgtcagccctcagcaaaggccctggagtggcttgcacacatttattagaatgataataaatactacagcccatctctgaagagtaggctcattatctccaacgacacctccaagaatgaagtgcttctaacagtgatcaacatggacattgtggacacagccacacattcctgtgcgaggagacgagggtatgatttttggagtggttatttggcctactggggccagggaaccctggtcaccgtctcctcag

SEQ ID NO: 12149 - DNA, 366 bp, Homo sapiens
gaggtgcagctggtggagtctgggggaggcttggtccagcctggggggtccctgagactctcctgtgcagcctctggattcacctttactagatattggatgaactgggtccgccaggctccagggaaggggctggagtgggtggccaacataaaacaagatggaagtgagaaatactatgtggactctgtgaagggccgattcaccatctccagagacaacgccaagaactcactgtatctgcaaatgaacagcctgagagacgacgacacggctgtgtattactgtgcgagaaacgactaccccaactactactactacggtatggacgtctggggccaagggaccacggtcaccgtctcctca

SEQ ID NO: 12150 - DNA, 367 bp, Homo sapiens
gaggtgcagctggtggagtctgggggaggcttggtacagcctggagggtccctgagactctcctgtgcagcctctggattcaccttcagtatttatgaaatgaactgggtccgccaggctccagggaaggggctggagtgggtttcacacattagcagtagtggtagtgtcatatactacgcagactctgtgaagggccgattcaccatctccagagacaacgccaagaactcactgtatctgcagatgaacagcctgagagccgaggacacggctgtttattactgtgcgagagtgggactcgaacttagcagcagctggtatcttgatatctggggccaagggacaatggtcaccgtctcttcag

SEQ ID NO: 12151 - DNA, 370 bp, Homo sapiens
cagctgcagctgcaggagtcgggcccaggactggtgaagccttcggagaccctgtccctcacctgcactgtctctggtggctccatcagcagtagtaattactactgggactggatccgccagccccccgggaaggggctggagtggattgggagtatctattatagtgggaacagctactacaacccgtccctcaagagtcgagtcaccatatccgtagacacgtccaagaaccagttctccctgaagctgagctctgtgaccgccgcagacacggctgtgtattactgtgcgagacgcctaatagtgggacctactgggggagagtttgactactggggccagggaaccctggtcaccgtctcctcag

SEQ ID NO: 12152 - DNA, 370 bp, Homo sapiens
cagatcaccttgaaggagtctggtcctacgctggtgaaacccacacagaccctcacgctgacctgcaccttctctgggttctcactcagcactagtgcagtgggtgtgggctggatccgtcagcccccaggaaaggccctggagtggcttgcactcatttattggaatgatgataagcgctacagcccatctctgaagagcaggctcaccatcaccaaggacacctccaaaaagcaggtggtccttacaatgaccaacatggaccctgtggacacagccacatattactgtgcacacacccctcagtatgatagtagtggttgcgcctttgactactggggccagggaaccctggtcaccgtctcctcag

SEQ ID NO: 12153 - DNA, 367 bp, Homo sapiens
gaggtgcagctggtgcagtctggagcagaggtgaaaaagcccggggagtctctgaagatctcctgtaagagttctggatacagttttaccagctactggatcggctgggtgcgccagatgcccgggaaaggcctggagtggatggggatcatcaatcctggtgactctgataccagatacagcccgtccttacaaggccaggtcaccatctcagccgacaagcccatcaacaccgcctacctgcagtggagcagcctgaaggcctcggacaccgccatgtattactgtgcgagacggggaaattcggtgactacggggagtgctcttgatatctggggccaggggacaatggtcaccgtctcttcag

SEQ ID NO: 12154 - DNA, 367 bp, Homo sapiens
gaggtgcggctggtggagtccgggggaggcttaattcagcctggggggtccctgagactctcctgtgcagcctctggattcaccttcagtagctactggatgcactgggtccgccaagctccagggaaggggctggtgtgggtctcacgtattaatagtgatgggactatcacaacctacgcggactccgtgaagggccgattcaccatctccagagacaacgccaagaacacgctgtatctgcaaatggacagtctcagagccgaggacacggctgtgtattactgtgcaagagattttactggagacagctatggttcctcctatgactcctggggccagggaaccctcgtcaccgtctcctcag

SEQ ID NO: 12155 - DNA, 367 bp, Homo sapiens
caggtgcagctggtggagtctgggggaggcttggtcaagcctggagggtccctgagactctcctgtgcagcctctggattcgccttcagtgactactacatgagttggatccgccaggctccagggaaggggctggagtgggtttcatacattagtagtagtggctctaccatacactacgcagactctgtgaagggccgattcaccatctccagggacaacgccaagaactccctgtatctgcaaatgaacagcctgagagacgaggacacggccgtcttttactgtgcgagatcggctggggcggtggtggttcttgctaaggttgactactggggccagggaaccctggtcaccgtctcctcag

SEQ ID NO: 12156 - DNA, 369 bp, Homo sapiens
caggtgcagctgcaggagtcgggcccaggactggtgaagccttcacagaccctgtccctcacctgcactgtctctggtggctccatcagcagtgataattactactggagctggatccgccagcacccagggaagggcctggagtggattgggtacatcaattacagtgggagcacctactacaacccgtccctcaagagtcgtgttgccatatcagtagacacgtctaagaaccagttctccctgaagctgagctctgtgactgccgcggacacggccgtgtattactgtgcgagagatcagcccacgtaccagttgcactacggtatggacgtctggggccaagggaccacggtcaccgtctcctca

SEQ ID NO: 12157 - DNA, 367 bp, Homo sapiens
caggtgcaactggtgcagtctggggctgaggtgaagaagcctggggcctcagtgaaggtctcctgcaaggcctctggatacacgttcaccggctactatatacactgggtgcgacaggcccctggacaagggcttgagtggatgggatggatcaaccctaacagtggtggcacaaactatgcacagaagtttcagggcagggtcaccatgaccagggacacgtccatcagcacagcctacatggagctgagcaggctgagatctgacgacacggccgtgtattactgtgcgagagatttcgggttttcccatctagtagggtccttcgatctctggggccgtggcaccctggtcactgtctcctcag

SEQ ID NO: 12158 - DNA, 366 bp, Homo sapiens
caggtgcacctggtgcagtctggggctgaggtgaagatgcctggggcctcagtgaaggtctcctgcaaggcttccggatacaccttcaccaactattttatacactgggtgcgacaggcccctggacaaggtcttgagtggatgggatggatcaaccctaacagtggtggcacaaactatgcacagaagtttcagggcagggtcaccatgaccagggacacgtccatcaacacagcctacatggagctgaacaggctaaattctgacgacacggccgtgtattactgtgcgaaagggttcgggagtaattatcactacttcggtctggacgtctggggccaagggaccacggtcaccgtctcctca

SEQ ID NO: 12159 - DNA, 400 bp, Homo sapiens
caggtccaggtggtacagtctggggctgaggtgaagaagcctggggcctcagtgaaggtctcctgcaaggtttccggatacaccctcactgaattatccatgcactgggtgcgacaggctcctggaaaagggcttgagtggatgggaggttttgatcctgaagatggtgaaacaatctacgcacagaagttccagggcagagtcaccatgaccgaggacacatctacagacacagcctacatggagctgagcagcctgagatctgaggacacggccgtgtattactgtgcaaccctcgggtatagcagcagctggcccagtctgtccgggtggaaaggattgggccggggaaactggttcgacccctggggccagggaaccctggtcaccgtctcctcag

SEQ ID NO: 12160 - DNA, 388 bp, Homo sapiens
caggtgcagctggtggagtctgggggaggcgtggtccagcctgggaggtccctgagactctcctgtgcagcctctggattcaccttcagtagctttggcatgcactgggtccgccaggccccaggcaaggggcaggagtgggtggcagttatttggtatgatggaagtaatgaatactatgcagactccgtgaggggccgattcaccatttccagagacaattccaagaacacgctgtatctgcaaatgaacagcctgagagtcgaggacacggctgtgtattactgtgcgagggggttcccaaagtattactatgatagtagcggttattaccggtacaactggctcgacccctggggccagggaaccctggtcaccgtctcctcag

SEQ ID NO: 12161 - DNA, 388 bp, Homo sapiens
gaggtgcagctgttggagtctgggggaggcttggtacagcctggggggtccctgagactctcctgtgcagcctctggattcacctttagcacctatgccatgagctgggtccgccaggctccagggaaggggctggagtgggtctcaggtattagtggtagtggtgttagcacatactacgcagcctccgtgaagggccggttcaccatctccagagacaattccaagaacacgctgtatctgcaaatgaacagcctgagagccgaggacacggccgtatattactgtgcgaaagaggggtcccgaaccgacccggtattacgatattttgactggttattcccgttcgacccctggggccagggaaccctggtcaccgtctcctcag

SEQ ID NO: 12162 - DNA, 385 bp, Homo sapiens
caggtgcagctgcaggagtcgggcccaggactggtgaagccttcggagaccctgtccctcacctgcactgtctctggtggctccatcagtagctactactggagctggatccggcagcccccagggaagggactggagtggattgggtatatctctcacagtgggagcaccaactacaacccctccctcaagagtcgagtcaccatatccgcagatacgtccaggaactacttctccctgaacctgagctctgtgaccgctgcggacacggccgtgtattactgtgcgagaaactccctcccccattactatggttcggggagttcctaccttgacaactggttcgacccctggggccagggaaccctggtcaccgtctcctcag

SEQ ID NO: 12163 - DNA, 367 bp, Homo sapiens
gaggtgcagctggtggagtctgggggaggcctggtcaagcctggggggtccctgagactctcctgtgcagcctctggattcaccttcagtacctatagcatgaactgggtccgccaggctccagggaaggggctggagtgggtctcatccattagtagtagtagtacttacatatactacgcagactcactgaagggccgattcaccatctccagagacaacgacaagaactcactgtatctgcaaatgaacagcctgagagccgaggacacggctgtatactactgtgcgagagatagccctagatggctacaatttgatgcttttgatatctggggccaagggacaatggtcaccgtctcttcag

SEQ ID NO: 12164 - DNA, 367 bp, Homo sapiens
gaggtgcagctggtggagtctgggggaggcctggtcaagcctggggggtccctgagactctcctgtgcagcctctggattcaccttcagtagctatagcatggactgggtccgccaggctccagggaaggggctggagtgggtctcatccattagtagtagtagtacttacatatactacgcagactcagtgaagggccgattcaccgtctccagagacaacgacaagaactcactgtatctgcaaatgaacagactgagagctgaggacacggctgtgtactactgtgcgagagatagccctagatggctacaatttggtgcttttgatatgtggggccaagggacaatggtcaccgtctcttcag

SEQ ID NO: 12165 - DNA, 364 bp, Homo sapiens
caggtgcagctacagcagtggggcgcaggactgttgaagccttcggagaccctgtccctcacctgcgctgtctatggtgggtccttcactgcttactactggagctggatccgccagcccccaggaaaggggctggagtgcattggggaaatcaaacatagtggaagcaccaactacaacccgtccctcaagagtcgagtcaccatatcagtagacacgtccaagtaccagttctccctgaaactgatctctgtgaccgccgcggacacggctgtgtattactgtgcgcgagcggaatacagtaactactttagccggtacttcgatctctggggccgtggcaccctggccactgtctcctcag

SEQ ID NO: 12166 - DNA, 384 bp, Homo sapiens
gaggtgcagctggtggagtctggaggaggcttgatccagcctggggggtccctgagactctcctgtgcagcctctgggttcaccgtcagtagcaactacatgagctgggtccgccaggctccagggaaggggctggagtgggtctcagttatttatagcggtggtagcacatactacgcagactccgtgaagggccgattcaccatctccagagacaattccaagaacacgctgtatcttcaaatgaacagcctgagagccgaggacacggccgtgtattactgtgcgagagatagctggattactatgatagtacaggacacgaactactactactacggtatggacgtctggggccaagggaccacggtcaccgtctcctca

SEQ ID NO: 12167 - DNA, 367 bp, Homo sapiens
caggttcagctggtgcagtctggagctgaggtgaagaagcctggggcctcagtgaaggtctcctgcaaggcttctggttacacctttaccagctatggtatcagctgggtgcgacaggcccctggacaagggcttgagtggatgggatggatcagcgcttacaatggtaacacaaactatgcacagaagctccagggcagagtcaccatgaccacagacacatccacgagcacagcctacatggagctgaggagcctgagatctgacgacacggccgtgtattactgtgcgagagatggaagatttttggagtggttattatccattgatatctggggccaagggacaatggtcaccgtctcttcag

SEQ ID NO: 12168 - DNA, 399 bp, Homo sapiens
caggtgcagctggtggagtctgggggaggcgtggtccagcctgggaggtccctgagactctcctgtgcagcgtctggattcaccttcagtagctatggcatgcactgggtccgccaggctccaggcaaggggctggagtgggtggcagttatatggtatgatggaagaaataaatactatgcagactccgtgaagggccgattcaccatctccagagacaattccaagaacacgctgtatctgcaaatgaacagcctgagagccgaggacacggctgtgtattactgtgcgagagagtacgaaggaaaaaaacatgactacggtgactacgtcggatatgactactactactacggtatggacgtctggggccaagggaccacggtcaccgtctcctca

SEQ ID NO: 12169 - DNA, 403 bp, Homo sapiens
caggtgcaggtggtggagtctgggggaggcttggtcaagcctggagggtccctgagactctcctgtgcagcctctggattcaccttcagtgactagtacatgagttggatccgccaggctccagggaaggggctggaatgggtttcatacattagtggtaatggtggtaccatatactacgcagactgtgtctgtgaagggccgattcaccatctccagggacaacggcaagaactcactgtttgtgcaaatgaacagcctgagagtcgaggacacggccgtgactctatggacgtctggggccaagggagcacggtcaccgtctcctcagcctgagagccgaggacacggccgtgacgctatggacgtctggggccaagggaccacggtcgccgtctcctca

SEQ ID NO: 12170 - DNA, 337 bp, Homo sapiens
caggtgcagctgcaggagtcgggcccaggactggtgaagccttcggagaccctgtccctcacctgcactgtctctggtgactccatcagtccttactactggagctggatccggcagcccccagggaagggactggagtggattggatatatgtattacagtgggagcaccacctacaacccttccctcaagagtcgaatcaccatatcagtagacacgtccaagaaccagttttccctgaaactgagctctgtgaccgctgcggacacggccgtttattactgtgcgaggggattcgacccctggggccagggaaccctggtcaccgtctcctcag

SEQ ID NO: 12171 - DNA, 337 bp, Homo sapiens
caggtgcagctgcaggagtcgggcccaggactggtgaagccttcggagaccctgtccctcacctgcactgtctctggtggctccatcagtagttactactggagctggatccggcagcccccagggaagggactggagtggattgggtatatgtattacagtgggagcaccaagtacaacccctccctcaagagtcgagtcaccatatcagtagacacgtccaagaaccaattctccctgaacctgatctctgtgacctctgcggacacggccgtgtattactgtgcgagggggttcgacctctggggccagggaaccctggtcaccgtctcttcag

SEQ ID NO: 12172 - DNA, 385 bp, Homo sapiens
caggtgcagctgcaggagtcgggcccaggactggtgaagccttcggagaccctgtccctcacctgcagtgtctctggtggctccatcagtagtgactactggagctggatccggcagaccccagggaagggactggagtggattgggtatatctattacagtgggagcaccaattacaacccctccctcaagagtcgagtcaccatatcggtagacacgtccaagaaccaggtctccctgaagctgagctctgtgactgctgcggacacggccgtgtactactgtgcgagagttggcccatgggattactatgatagtagtggttattctccccgtcccctctttgactactggggccagggatccctggtcaccgtctccgcag

SEQ ID NO: 12173 - DNA, 373 bp, Homo sapiens; identical to SEQ ID NO: 11174

SEQ ID NO: 12174 - DNA, 364 bp, Homo sapiens
gaggtgcagctggtggagtctgggggaggcctggtcaagcctggggggtccctgagactctcctgtgcagcctctggattcaccttcagtagctatagcatgaactgggtccgccaggctccagggaaggggctggagtgggtctcatccattagtagtagtagtagttacatatactacgcagactcagtgaagggccgattcaccatctccagagacaattccaagaacacgctgtatttggaagtgagcagcctgagaactgaggacacggctgtgtattactgtgcaagaactaacaatgggaactacaacggctactttgactactggggccagggaaccctggtcaccgtctcctcag

SEQ ID NO: 12175 - DNA, 364 bp, Homo sapiens
caggtgcagctggtgcagtctggggctgaggtgaagaagcctggggcctcagtgaaggtctcctgcaaggcttctggatacaccttcaccggctactatatgcactgggtgcgacaggcccctggacaagggcttgagtggatgggatggatcaaccctaacagtggtggcacaaactatgcacagaagtttcagggcagggtcaccatgaccagggacacgtccatcagcacagcctacatggagctgagcaggctgagatctgacgacacggccgtgtattactgtgcgagagtaagacaggtgggagccacttggagctttgactactggggccagggaaccctggtcaccgtctcctcag

SEQ ID NO: 12176 - DNA, 364 bp, Homo sapiens
caggtccagcttgtgcagtctggggctgaggtgaagaagcctggggcctcagtgaaggtttcctgcaaggcttctggatacaccttcactagctatgctatgcattgggtgcgccaggcccccggacaaaggcttgagtggatgggatggatcaacgctggcaatggtaacacaaaatattcacagaagttccagggcagagtcaccattaccagggacacatccgcgagcacagcctacatggagctgagcagcctgagatctgaagacacggctgtgtattactgtgcgagagccccaaaggcaccgggcgggaggccctttgactcctggggccagggaaccctggtcaccgtctcctcag

SEQ ID NO: 12177 - DNA, 387 bp, Homo sapiens
gaggtgcagctggtggagtccgggggaggcttagttcagcctggggggtccctgagactctcctgtgcagcctctggattcaccttcagtagctactggatgcactgggtccgccaagctccagggaaggggctggtgtgggtctcacgtattaatagtgatgggagtagcacaagctacgcggactccgtgaagggccgattcaccatctccagagacaacgccaagaacacgctgtatctgcaaatgaacagtctgagagccgaggacacggctgtgtattactgtgcaagagatccgaaaattgcttactatgatagtagtggttatcactactactacggtatggacgtctggggccaagggaccacggtcaccgtctcctca

SEQ ID NO: 12178 - DNA, 364 bp, Homo sapiens
gaggtgcacctggtggagtctgggggtgccttggtacagcctggagggtccctgagactctcctgtgcagcctccggcttcaccttcaatagctatgaaatgaactgggtccgccaggctccagggaaggggctggagtgggtttcatatattagtagtagtggtagtagcctacactacagagactctgtgaagggccggttcaccatctccagagacaacgccaagaactcactgtatctgcaaatgaatagcctgagaggcgaggacacggctgtttattattgtgcgagaattggtatagcagcagttggaaaggactttgactcctggggccagggaaccctggtcaccgtctcctcag

SEQ ID NO: 12179 - DNA, 364 bp, Homo sapiens
gaggtgcagctggtggagtctgggggaggcttggtacagcctggagggtccctgagactctcctgtgcagcctctggattcaccttcagtagttatgaaatgaactgggtccgccaggctccagggaaggggctggagtgggtttcatacattagtagtagtggtagtaccatatactacgcagactctgtgaagggccgattcaccatctccagagacaacgccaagaactcactgtatctgcaaatgaacagcctgagagccgaggacacggctgtttattactgtgcgagagatctgaaggcacgatattttgataagggggactactggggccagggaaccctggtcaccgtctcctcag

SEQ ID NO: 12180 - DNA, 364 bp, Homo sapiens
gaggtgcagctggtggagtctgggggagacttggttcagcctggagggtccctgagactctcctgtgcagcctctggattcaccttcagtgcttttgaaatgcactgggtccgccaggctccagggaaggggctggagtgggtttcatatattagtcgtagtggtagtaccatatactatgcagaccctgtgaagggccgattcaccatctccagagacaacgccaagagctcactgtttctgcaaatgaataacctgagagccgaggacacggctatttattactgtgcgagggaaatgctcgctgcaacagcgggggcttttgactactggggccagggaaccctggtcaccgtctcctcag

SEQ ID NO: 12181 - DNA, 370 bp, Homo sapiens
gaggtgcagctggtggagtctgggggaggcttggtccagcctggagggtccctgagactctcctgtgcagcctctggattcaccttcagtgaccactacatggactgggtccgccaggctccggggaaggggctggagtgggttggccgtactagaaacaaagctaacacttacaccacagaatacgccgcgtctgtgaaaggcagattcaccatctcaagagatgattcaaagaactcactgtatctgcaaatgaacagcctgaaaatcgaggacacggccgtgtattactgtactagactgcgatatagcagcagttggtacttcattgactactggggccagggaaccctggtcaccgtctcctcag

SEQ ID NO: 12182 - DNA, 364 bp, Homo sapiens
caggtgcagctggtggagtctgggggaggcgtggtccagcctgggaggtccctgagactctcctgtgcagcgtctggattcactttcagtaattatggcatgcactgggtccgccaggctccaggcaaggggctggagtgggtggcagttatatggtatgatggaagtaataaatattatgcagactccgtgaagggccgattcaccatctccagagacaattccaagaacacgctgtatttggaagtgagcagcctgagaactgaggacacggctgtgtattactgtgcaagaactaacaatgggaactacaacggctactttgactactggggccagggaaccctggtcaccgtctcctcag

SEQ ID NO: 12183 - DNA, 364 bp, Homo sapiens
caggtgcagctggtggagcgggggggaggcgtggtccagcctgggaggtccctgagactctcctgtgcagtctctggattcaccttcagtagctatggcatgcactgggtccgccaggctccaggcaaggggctggagggggtggcagttatatggtatgatggaagcaataaatattatgcagactccctgaagggccgattcaccatctccagagacaattccaagaacatactgtatttgcaaatgaacagcctgagagccgaggacacggctgtgtattactgtgcgagagagggaacgataactgaaactactgggcttgacgtctggggccagggaaccctggtcaccgtctcctcag

SEQ ID NO: 12184 - DNA, 364 bp, Homo sapiens
caggtccagctggtacagtctggggctgaggtgaagaagcctggagcctcagtgaaggtctcctgcaaggtttccggatacaccctcattgaattatccatgcactgggtgcgacaggctcctggaaaagggcttgagtggatgggaggttttgatcctgaagatgctgaaaccatctacgcacagaagttccagggcagagtcaccatgaccgaggacacatctacagacacagcctacatggagctgagcagcctgagatctgaggacacggccgtgtattactgtgcaacagaagccgctttttttggagtggtttatatgcactactggggccagggaaccctggtcaccgtctcctcag

SEQ ID NO: 12185 - DNA, 364 bp, Homo sapiens
gaggtgcaactggtggagtctgggggaggcttggtacagcctggggggtccctgagactctcctgtgcagcctctggattcatgtttagcaccaataccttgagctgggtccgccaggctccagggaaggggctggagtgggtctcagatattagtgacaatggcgatagcacatactatgcagactccgtgaagggccggttcaccatctccagagacaactccatgcacacgctgcatctgcaaatgaacagcctgagagccgaggacacggccttttattactgtgcgaaacccaggcatagcagtggggcctccttctgggactactggggccagggaaccctggtcaccgtctcctcag

SEQ ID NO: 12186 - DNA, 364 bp, Homo sapiens
gaggtgcagctggtggagtctgggggaggcctggtcaagcctggggggtccctgagactctcctgtgcagcctctggattcagtttcaacaactattggatgagttgggtccgccaggctccagggaaggggctggagtgggtggccaatataaaacaagatggaagtgggccggcctatgtggactctgtgaagggccgattcaccatctccagagacaacgccaagaactcactgtatctgcaaatgaacagcctgagagccgaggacacggctatctactactgtgcgagagatagagtaccaactgtctggagtggacttaacaactggggccagggaaccctggtcaccgtctcctcag

SEQ ID NO: 12187 - DNA, 364 bp, Homo sapiens
gaggtgcagctggtggagtctgggggaggcttggtccagcctggggggtccctgagactctcctgtgcagcctctggattcacctttactagatattggatgaactgggtccgccaggctccagggaaggggctggagtgggtggccaacataaaacaagatggaagtgagaaatactatgtggactctgtgaagggccgattcaccatctccagagacaattccaagaacacgctgtatttggaagtgagcagcctgagaactgaggacacggctgtgtattactgtgcaagaactaacaatgggaactacaacggctactttgactactggggccagggaaccctggtcaccgtctcctcag

SEQ ID NO: 12188 - DNA, 363 bp, Homo sapiens
caggtgcagctggtggagtctgggggagacttggtcaagcctggagggtccctgcgactctcctgtgcagcctctggattcaccttcagtgaccactacatgagctggatccgccaggctccagggaaggggctggaatggatttcatacattagtaatagtggcagtgccatatactacgcagactctgtgaagggccgattcaccatctccagggacaacgccaggaatttgctgtttctgcaaatgaacagcctgagagccgaagacacggccgtgtattactgtgcgagagatcggagacccagccaatggatcggtctggacgtctggggccaagggaccacggtcaccgtctcctca

SEQ ID NO: 12189 - DNA, 367 bp, Homo sapiens
cagctgcagctgcaggagtcgggcccaggactggtgaagccttcggagaccctgtccctcacctgcactgtctctggtggctccatcagcactagtatttactactggggctggatccgccagcccccagggatgcggctggagtggattgggagtatctataatagtggaacctcctactacaacccgtccctcaagagtcgagtcaccatatccgtagacacggccaagaaccagttctccctgaagctgagctctgtgaccgccgcagacacggctgtgtattactgtgcgagaagttctaggtcccctcgagttacggcatatgactactggggccagggaaccctggtcaccgtctcctcag

SEQ ID NO: 12190 - DNA, 360 bp, Homo sapiens
caggtgcagctgcaggagtcgggcccaggactggtgaagccttcggagaccctgtccctcacctgcactgtctctggtggctccatcagtagttactactggagctggatccggcagcccccagggaagggactggagtggattgggtatatctattacagtgggagcaccaactacaacccctccctcaagagtcgagtcaccatatcagtagacacgtccaagaaccagttctccctgaagctgagctctgtgaccgccgcagacacggccgtgtattactgtgcgagacatgtaggtacctactactactactacatggacgtctggggcaaagggaccacggtcaccgtctcctca

SEQ ID NO: 12191 - DNA, 360 bp, Homo sapiens
caggtgcagctgcaggagtcgggcccaagactggtgaagccttcggagaccctgtccctcacctgcactgtctctggtgcctccatcagtagtaactactggagttggatccgacagcccccagggaaggaactggagtggattgggcacatctataacggtggaaacaccaactacaacccctccctcaggagtcgagtcaccatatcaatagaaacgtccaagaaccaattctccctgaacctgaactctgtgaccgctgcggactcggccgtatatttctgtgcgagagatcggcagccgagcagatacatcggtctggacgtctggggccaagggaccgcggtcaccgtctcctca

SEQ ID NO: 12192 - DNA, 361 bp, Homo sapiens
caggtgcagctacaacagtggggcgcaggactgttgaagccttcggagaccctgtccctcacctgcgctgtctatggtgggtccttcagtggttactactggagctggatccgccagcccccagggaaggggctggagtggattggggaaatcaatcatagtggaagcaccaactacaacccgtccctcaagagtcgagtcaccatatcagtagacacgtccaagaaccagttctccctgaagctgagctctgtgaccgccgcggacacggctgtgtattactgtgcgagaggccctatgataccctcaaaaagggcttttgatatctggggccaagggacaatggtcaccgtctcttcag

SEQ ID NO: 12193 - DNA, 361 bp, Homo sapiens
caggtgcagctgcaggagtcgggcccaggactggtgaagccttcggagaccctgtccctcgtctgcgctgtctctggtgcctccattagcagttactattggagctggatccggcagcccccagggaagggactggagtgggttggctttatctcttatagtgggagcaccaggtacaacccctccctcaagagtcgcgccaccatttcagcagacacgtccaacaatcagttcttcctgacggtgacctctgtgaccgccgcagacacggccatgtattactgtgcgagacagtcggggacatatagtagtaggtggcttgacttctggggccggggaaccctggtcaccgtctcctcag

SEQ ID NO: 12194 - DNA, 364 bp, Homo sapiens
gaagtgcagctggtgcagtccggagcagaggtgaaaaagcccggggagtctctgaggatctcctgtaagggttctggatacagctttaccagctactggatcagctgggtgcgccagatgcccgggaaaggcctggagtggatggggaggattgatcctagtgactcttataccaactacagcccgtccttccaaggccacgtcaccatctcagctgacaagtccatcagcactgcctacctgcagtggagcagcctgaaggcctcggacaccgccatgtattactgtgcgagacattggtacagctatggtgtttactactttgactactggggccagggaaccctggtcaccgtctcctcag

SEQ ID NO: 12195 - DNA, 361 bp, Homo sapiens
caggtgcagctgcaggagtcgggcccaggactggtgaagccgtcggagaccctgtccctcacctgcactgtctctggtggctccatcagtagctactactggagctggatccggcagcccccagggaagggactggagtggattgggtatatctattacagtgggagcaccaattacaacccctccctcaacagtcgagtcaccatatcaatagacacgtccaagaaccagttctccctgaagctgagctctgtgaccgccgcagacacgggcgtgtattactgtgcgagacatcggtatagtagcagctggtactggttcgacccctggggccagggaaccctggtcaccgtctcctcag

SEQ ID NO: 12196 - DNA, 366 bp, Homo sapiens
cagctgcagctgcaggagtcgggcccaggactggtgaagtcttcggagaccctgtccctcacctgcactgtctctggtggctccatcagcagtagtggtttctactggggctggatccgccagcccccagggagggggctggagtggattgggaatatctattatagtgggatcacctactacaacccgtccctcaagagtcgagtcaccatatccgtagacacgtccaagaaccagttctccctgaagctgagctctgtgaccgccgcagacacggctgtgtattactgtgcgagaccaagtaccacttggccccactactccatggacgtctggggcaaagggaccacggtcaccgtcgcctca

SEQ ID NO: 12197 - DNA, 363 bp, Homo sapiens
gaagtgctactggtggagtctggggggggcttggtccagcctgggggtccctgagactctcctgtacagcctctggattcacctttagtagccattacatgagctgggtccgccaggctccagggaaggggctggagtgggtggccaacataaaacaagatgggagtgaccagtactatgtggactctgtgaagggtcgattcaccatctccagagacaacgccaagaattctttgtacttgcaaatgaacagcctgacagccgaggacacggccgtctattactgtgcgagagatcgacagcccaactcgtacttggggctcggcccctggggccagggaaccctggtcaccgtctcctcag

SEQ ID NO: 12198 - DNA, 393 bp, Homo sapiens
gaggtgcagctggtggagtctgggggaggcctggtcaagcctggggggtccctgagactctcctgtgcagcctctggattcaccttcagtagctatagcatgaactgggtccgccaggctccagggaaggggctggagtgggtctcatccattagtagtagtagtagttacatatactacgcagactcagtgaagggccgattcaccatctccagagacaacgccaagaactcactgtatctgcaaatgaacagcctgagagccgaggacacggctgtgtattactgtgcgagggggtatagcagtggctggtcgagaggaagcaacaatctgccgaattactactacggtatggacgtctggggccaagggaccacggtcaccgtctcctca

SEQ ID NO: 12199 - DNA, 364 bp, Homo sapiens
caggtgcagctggtgcagtctggggctgaggtgaagaagcctggggcctcagtgaaggtctcctgcaaggcttctggatacaccttcaccggctactatatgcactgggtgcgacaggcccctggacaagggcttgagtggatgggatggatcaaccctaacagtggtggcacaaactatgcacagaagtttcagggcagggtcaccatgaccagggacacgtccatcagcacagcctacatggagctgagcaggctgagatctgacgacacggccgtgtattactgtgcgagagaggtggtgtatgctagcatcaactggttcgacccctggggccagggaaccctggtcaccgtctcctcag

SEQ ID NO: 12200 - DNA, 364 bp, Homo sapiens
caggtgcagctggtgcagtctggggctgaggtgaagaagcctggggcctcagtgaaggtctcctgtaagggttctggatacaccttcaccgcccagtatatgcactgggtgcgacaggcctctggacaaggacttgagtggatgggatggatcaaccctaacaatggtgccacaaactatgcacagaattttcagggcagggtcaccatgaccagggacacatccatcagcacagtctacatggagttgagcaggctgacttttgacgacacggccgtgtattactgtgcgagagacgagtatactatttcgtccgggaggttcgacccctggggccagggaaccctggtcaccgtctcctcag

SEQ ID NO: 12201 - DNA, 379 bp, Homo sapiens
gaggtgcagctggtggagtctgggggaaaattggtccagcctggggggtccctgagactctcctgtgcagcctctggattcacctttagtagctattggatgagctgggtccgccaggctccagggaaggggctggagtgggtggccaagataaagcaagatggaagtgacaaatactatgtggactctgtgaagggccgattcaccatctccagagacaacgccaagaactcactgtatctgcaaatgaacagcctgagagccgaggacacggccgtgtatttctgtgcgagggaaacgtattactatgatagcagtggttatggtgtgaactggttcgacccctggggccagggaaccctggtcaccgtctcctcag

SEQ ID NO: 12202 - DNA, 376 bp, Homo sapiens
caggtgcagctgcaggagtcgggcccaggactggtgaagccttcggagaccctgtccctcacctgcactctctctggtggctccatcagtagttactactggagctggatccggcagtccccagggaagggactggagtggattgggtatatctattacagtgggagcaccaactacaacccctccctcaagagtcgagtcaccatatcagtagacacgtccaagaaccagttctccctgaagctgagctctgtgaccgccgcggacacggctgtgtattactgtgcgagaggcggcgggggtattgttgtggtggtagctgctacgtactggttcgacccctggggccagggaaccctggtcaccgtctcctcag

SEQ ID NO: 12203 - DNA, 379 bp, Homo sapiens
cagcttcagctggtgcagtctggagctgaggtgaagaagcctggggcctcagtgaaggtctcctgcaaggcttctggttacagttttaccagcttcggtatcagctgggtgcggcaggcccctggacaagggcttgagtggatgggagggatcatccctatctttggtacagcaaactacgcacagaagttccagggcagagtcacgattaccgcggacgaatccacgagcacagcctacatggagctgagcagcctgagatctgaggacacggccgtgtattactgtgcgagagtgggtggatattgtagtggtggtagctgctactcttactactttgactactggggccagggaaccctggtcaccgtctcctcag

SEQ ID NO: 12204 - DNA, 379 bp, Homo sapiens
caggtgcagctggtgcagtctggggctgaggtgaagaagcctgggtcctcggtgaaggtctcctgcaaggcttctggaggcaccttcagcagctatgctatcagctgggtgcgacaggcccctggacaagggcttgagtggatgggagggatcatccctatctttggtacagcaaactacgcacagaagttccagggcagagtcacgattaccgcggacgaattcatgagcacagcctacatggagctgagcagcctgagatctgaggacacggccgtgtattactgtgcgagcggccccagggggtgtagtggtggtagctgctattccacccgcccggactactggggccagggaaccctggtcaccgtctcctcag

SEQ ID NO: 12205 - DNA, 361 bp, Homo sapiens
caggtgcagctacagcagtggggcgcaggactgttgaagccttcggagaccctgtccctcacctgcgctgtctatggtgggtccttcagtggttactactggagctggatccgccagcccccagggaaggggctggagtggattggggaaatcaatcatagtggaagcaccaactacaacccgtccctcaagagtcgagtcaccatatcagtagacacgtccaagaaccagttctccctgaagctgagctctgtgaccgccgcggacacggctgtgtattactgtgcgagagtccctaactgggccggtaaaaactggttcgacccctggggccagggaaccctggtcaccgtctcctcag

SEQ ID NO: 12206 - DNA, 364 bp, Homo sapiens
gaggtgcagctggtgcagtctggagcagaggtgaaaaaacccggggagtccctgaagatctcctgtaagggttctggatacagctttatcacctactggatcggctgggtgcgccagatgcccgggaaagggctggagtggatgggcatcgtctatcctggtgactctgaaaccagatacagtccgtccttccaaggccaggtcaccatctcagccgacaagtccatcagcaccgccttcctgcaatggagcagcctgaaggcctcggacaccgccatttattactgtgcgaggagtagtggctggccgaacggctactggttcgacccctggggccagggaaccctggtcaccgtctcctcag

SEQ ID NO: 12207 - DNA, 379 bp, Homo sapiens
caggtgcagctggtggagtctgggggaggcgtggtccagcctgggaggtccctgagactctcctgtgcagcgtctggattcaccttcagtagctatggcatgcactgggtccgccaggctccaggcaaggggctggagtgggtggcagttatatggtatgatggaagtaataaatactatgcagactccgtgaagggccgattcaccatctccagagacaattccaagaacacgctgtatctgcaaatgaacagcctgagagccgaggacacggctgtgtattactgtgcgagagatggaggatcttgtagtggcggtagctgctactgggggtggttcgacccctggggccagggaaccctggtcaccgtctcctcag

SEQ ID NO: 12208 - DNA, 393 bp, Homo sapiens
caggttcagttggtgcagtctggagctgaggtgaagaagcctggggcctcagtgaaggtctcctgcaaggcttctggttacacctttaccagctacggtatcagctgggtgcgacaggcccctggacaagggcttgagtgcatgggatggatcagcgcatacaatggtaacacaaactatgcacagaacttacagggcagagtcaccatgaccacagacacatccacgagcacagcctacatggagctgaggagcctgagatctgacgacacggccgtgtattactgtgcgagacgttttcctgactattccgggcgggtgaccggactaggcatgggctactactactacatggacgtctggggcaaagggaccacggtcaccgtctcctca

SEQ ID NO: 12209 - DNA, 379 bp, Homo sapiens
caggtgcagttggttgagtctgggggaggcgtggcccagcctgagacatccctgagactctcctgtgcagcctctgacttcaccttcagtgcctttggcatgcattgggtccgtcaggctccaggcaaggggctggaatgggtctctggcatttcatatggtggaactcttaagtactatgcagactccgttaagggccgattcaccatctccagagacaactccagggacagactgtatctccaaatggaccgcctgagagtcgaagacacggctgtctatttctgtgcgaggcttccatttttggactggttgttgtctagaacgccagtccactttcactcctggggccagggaaccctggtccgcgtctcttcag

SEQ ID NO: 12210 - DNA, 376 bp, Homo sapiens
caggtgcagctgcaggagtcgggccgaggactggtgaagccttcggagaccctgtccctcacctgcactgtctctggtggctccatgagtagtttctactggagctgggtccggcagcccccagggaagggactggagtggattgggtatatctattacagtgggatcaccaactacaacccctccctcaagagtcgagtcaccatatcagtagacacgtccaagaaccagttctccctgaagctgacctctgtgaccgctgcggacacggccgtgtattactgtgcgagaactactgggagcagcggctggaacctgcgggagggggactactttgactactggggccagggaaccctggtcaccgtctcctcag

SEQ ID NO: 12211 - DNA, 378 bp, Homo sapiens
gaggtgcagctggtggagtctgggggaggcctggtcaagcctggggggtccctgagactctcctgtgcagcctctggattcaccttcagtagctatagcatgaactgggtccgccaggctccagggaaggggctggagtgggtctcatccattagtagtagtagtagttacatatactacgcagactcagtgaagggccgattcaccatctccagagacaacgccaagaactcactgtatctgcaaatgaacagcctgagagccgaggacacggctgtgtattactgtgcgagagtgagtcctaacgtattacgatattttgactggttagggccaatggacgtctggggccaagggaccacggtcaccgtctcctca

SEQ ID NO: 12212 - DNA, 379 bp, Homo sapiens
caggtgcagctggtgcagtctggggctgaggtgaagaagcctggggcctcagtgaaggtttcctgcaaggcatctggatacaccttcaccagctactatatgcactgggtgcgacaggcccctggacaagggcttgagtggatgggaataatcaaccctagtggtggtagcacaagctacgcacagaagttccagggcagagtcaccatgaccagggacacgtccacgagcacagtctacatggagctgagcagcctgagatctgaggacacggccgtgtattactgtgcgagagtgggtggatattgtagtggtggtagctgctactcttactactttgactactggggccagggaaccctggtcaccgtctcctcag

SEQ ID NO: 12213 - DNA, 373 bp, Homo sapiens
cagatcaccttgaaggagtctggtcctacgctggtgaaacccacacagaccctcacgctgacctgcaccttctctgggttctcactcagcactagtggagtgggtgtgggctggatccgtcagcccccaggaaaggccctggagtggcttgcactcatttattggaatgatgataagcgctacagcccatctctgaagagcaggctcaccatcaccaaggacacctccaaaaaccaggtggtccttacaatgaccaacatggaccctgtggacacagccacatattactgtgcacacagggcctcagcgatacagctaggacgtttctactttgactactggggccagggaaccctggtcaccgtctcctcag

SEQ ID NO: 12214 - DNA, 373 bp, Homo sapiens
cagctgcagctgcaggagtcgggcccaggactggcgaagccttcggagaccctgtccctcacctgcactgtctctgatggctccatcagaagtagtagttactactggggctggatccgccagcccccagggaaggggctggagtggattgggagtatttattatagtgggaccacctactacaacccgtccctcaagagtcgagtcaccatatccgtagacacgtccaagaaccagttctacctgaagctgagctctgtgaccgccgcagacacggctatgtattactgtgcgagactgggctggaactacgcgcagggtcggggcaactttgactactggggccagggaaccctggtcaccgtctcctcag

SEQ ID NO: 12215 - DNA, 379 bp, Homo sapiens
gaggtgcagctgttggaatctgggggaggcttggtacagcctggggggtccctgagactctcctgtgcagcctctggattcacctttagcagctatgccatgagctgggtccgtcaggctccagggaaggggctggagtgggtctcagttattagtggtagtggtggtagcacatactacgcagactccgtgaagggccggttcaccatctccagagacaattccaagaatacgctgtatctgcaaatgatcagcctgagagccgaggacacggccgtatattactgtgcgaaagtggaagaggtcggatattgtactactaccagctgccgatattttgactactggggccagggaaccctggtcaccgtctcctcag

SEQ ID NO: 12216 - DNA, 376 bp, Homo sapiens
caggtgcagctacagcagtggggcgcaggactgttgaagccttcggagaccctgtccctcacctgcgctgtctatggtgggtccttcagtggttactactggagctggatccgccagcccccagggaaggggctggagtggattggggaaatcaatcatagtggaagcaccaactacaacccgtccctcaagagtcgagtcaccatatcagtagacacgtccaagaaccagttctccctgaagctgagctctgtgaccgccgcggacacggctgtgtattactgtgcgagaggttcccccgggtatagcagcagctggcgcccgtccggctggttcgacccctggggccagggaaccctggtcaccgtctcctcag

SEQ ID NO: 12217 - DNA, 376 bp, Homo sapiens
caggtgcagctacagcagtggggcgcaggactgttgaagccttcggagaccctgtccctcacctgcgctgtctatggtgggtccttcagtggttactactggagctggatccgccagcccccagggaaggggctggagtggattggggaaatcaatcatagtggaagcaccaactacaacccgtccctcaagagtcgagtcaccatatcagtggacacgtccaagaaccagttctccctgaagctgagctctgtgaccgccgcggacacggctgtgtattactgtgcgagaggcggcgggggtattgttgtggtggtagctgctacgtactggttcgacccctggggccagggaaccctggtcaccgtctcctcag

SEQ ID NO: 12218 - DNA, 376 bp, Homo sapiens
caggtgcagctacagcagtggggcgcaggactgttgaagccttcggagaccctgtccctcacctgcgctgtctatggtgggtccttcagtgcttactactggagctggatccgccagcccccagggaaggggctggagtggattggggacatcaagcatagtggaagcaccaactacaatccgtccctcaagagtcgagtcgccatatcagtagacacgtccaagaaccagttctccctgaacctgagctctgtgaccgccgcggacacggctgtgtattactgtgcgagaggagtgcgcgatttttggagtggtcattatactcccaactggttcgacccctggggccagggaaccctggtcaccgtctcctcag

SEQ ID NO: 12219 - DNA, 367 bp, Homo sapiens
gaggtgcagctggtggagactggaggaggcttgatccagcctggggggtccctgagactctcctgtgcagcctctgggttcaccgtcagtagcaactacatgagctgggtccgccaggctccagggaaggggctggagtgggtctcagttatttatagcggtggtagcacatactacgcagactccgtgaagggccgattcaccatctccagagacaattccaagaacacgctgtatcttcaaatgaacagcctgagagccgaggacacggccgtgtattactgtgcgagagagggtgggagtatagcagcagctggtacgaactttgactactggggccagggaaccctggtcaccgtctcctcag

SEQ ID NO: 12220 - DNA, 378 bp, Homo sapiens
caggtgcagctggtgcagtctggggctgaggtgaagaagcctggggcctcagtgaaggtctcctgcaaggcttctggatacaccttcaccagttatgatatcaactgggtgcgacaggccactggacaagggcttgagtggatgggatggatgaaccctaacagtggtaacacaggctatgcacagaagttccagggcagagtcaccatgaccaggaacacctccataagcacagcctacatggagctgagcagcctgagatctgaggacacggccgtgtattactgtgcgagagcctcgggttgtactaatggtgtatgctactactactacggtatggacgtctggggccaagggaccacggtcaccgtctcctca

SEQ ID NO: 12221 - DNA, 366 bp, Homo sapiens
caggtgcagctgcaggagtcgggcccaggactggtgaagccttcggagaccctgtccctcacctgcactgtctctggtggctccatcagtagttactactggagctggatccggcagcccccagggaagggactggagtggattgggtatatctattacagtgggagcaccaactacaacccctccctcaagagtcgagtcaccatatcagtagacacgtccaagaaccagttctccctgaagctgagctctgtgaccgctgcggacacggccgtgtattactgtgcgagaggtaggactatggttcggggagttaccatccacatggacgtctggggcaaagggaccacggtcaccgtctcctca

SEQ ID NO: 12222 - DNA, 370 bp, Homo sapiens
caggttcagctggtgcagtctggagctgaggtgaagaagcctggggcctcagtgaaggtctcctgcaaggcttctggtcacacctttaccagctatggtatcagctgggtgcgacaggcccctggacaagggcttgagtggatgggatggatcagcgcttacaatggtaacacaaactatgcacagaagctccagggcagagtcaccatgaccacagacacatccacgagcacagcctacatggagctgaggagcctgagatctgacgacacggccgtgtattactgtgcgagagatttgatggattactatgataggagtggttatttgagcccgtggggccagggaaccctggtcaccgtctcctcag

SEQ ID NO: 12223 - DNA, 370 bp, Homo sapiens
caggtgcagctggtggagtctgggggaggcgtggtccagcctgggaggtctctgcgactctcctgtggagcgtctggattcaccttcaggagccataccatgcactgggtccgccaggctccaggcaaggggctggagtgggtggcagttatatggtatgatggcagtaatagttactatgcagacaccgtgaagggccgattcaccatctccagagacaattccaagaacatactgtatctacaaatgaacatcctgagagccgaggacacggctgtttactactgtgcgagggaaagggggacaatcttgactaaggatgacgctcttgatatttggggccaagggacaatggtcaccgtctcttcag

SEQ ID NO: 12224 - DNA, 370 bp, Homo sapiens
gaggtgcagctgttggagtctgggggaggcttggtacagcctggggggtccctgagactctcctgtgcagcctctggattcacctttagcagctttgccatgagctgggtccgccaggctccagggaaggggctggagtgggtctcttctattagtggtgatggtagtaacacatactacgcagactccgtgaagggccggttcaccctctccagagacaattccaagaacacactgtatctgcaaatgaacagcctgagagccgaggacacggccgtatattactgtgcgaaagatggcaggggggtctatagcagcaaggactggttcgacccctggggccagggaaccctggtcaccgtctcctcag

SEQ ID NO: 12225 - DNA, 396 bp, Homo sapiens
caggtacaactgcagcagccaggtccaggactggtgaagtcctcgcagaccctctcactcacctgtgccatctccggggacagtgtctctagcaacagtgctgcttgaaactatatcaggcagtccccatcgagaggccttgagtggctgggaaggacatactaccggtccaagtgatataatgactatgcagtatctgtgaaaagtgctgtatctgtgaaaagtcgaataaccattaagtcagacacatccaagaaccagttgtccctgcagctgaactctgtgactcccgaggacacggctgtgtatttctgtgcaagagatcggtaactccgagtcaactactactacggtatggacgtctggggccaagggaccacggtcaccgtctcctca

SEQ ID NO: 12226 - DNA, 369 bp, Homo sapiens
gaggtgcagctgttggagtctgggggaggcttggtacagcctggggggtccctgagactctcctgtgcagcctctggattcacctttagcagctatgccatgagctgggtccgccaggctccagggaaggggctggagtgggtctcagctattagtggtagtggtggtagcacatactacgcagactccgtgaagggccggttcaccatctccagagacaattccaagaacacgctgtatctgcaaatgaacagcctgagagccgaggacacggccgtatattactgtgcgaaatgtttggagcctcattactactactactacggtatggacgtctggggccaagggaccacggtcaccgtctcctca

SEQ ID NO: 12227 - DNA, 367 bp, Homo sapiens
caggtgcagctgcaggagtcgggcccaggactggtgaagccttcggagaccctgtccctcacctgcactgtctctggtggctccatcagtagttactactggagctggatccggcagcccccagggaagggactggagtggattgggtatatctattacagtgggagcaccaactacaacccctccctcaagagtcgagtcaccatatcagtagacacgtccaagaaccagttctccctgaagctgagctctgtgaccgctgcggacacggccgtgtattactgtgcgacggcccccttctatagcagcagcttctacggctggttcgacccctggggccagggaaccctggtcaccgtctcctcag

SEQ ID NO: 12228 - DNA, 366 bp, Homo sapiens
aggtgcagctggtggagtctgggggaggcttggtacagcctggggggtccctgagactctcctgtgcagcctctggattcaccttcagtagctacgacatgcactgggtccgccaagctacaggaaaaggtctggagtgggtctcagctattggttctgctggtgtcacatactattcaggctccgtgaaggcccgattcaccatctccagagaaaaggccaagaactccttgtatcttcaaatgaacagcctgagagccggggacacggctgtgtattactgtgcaagaggtggatacagctatggttacggaggttgggtctttgactactggggccagggaaccctggtcaccgtctcctcag

SEQ ID NO: 12229 - DNA, 370 bp, Homo sapiens
caggtgcagctggtggagtctgggggaggcttggtcaagcctggagggtccctgagactctcctgtgcagcctctggattcgccttcagtgactactacatgagctggatccgccaggctccagggagggggctggagtgggtttcatacattagtgttagtggtgctaccacgtactacgcagactctgtgaagggccgattcaccatctccagggacaacgccaagaactcactctatctgcaaatgaacaacctgagagccgaggacgcggccgtgtattactgtgcgagagattttagaacgtattactatgataatggtgccccgggctactggggccagggaaccctggtcaccgtctccccag

SEQ ID NO: 12230 - DNA, 370 bp, Homo sapiens
caggtgcaactggtggagtctgggggaggcttggtcaagcctggagggtccctgagactctcctgtgcagcctctggattcgccttcagtgactactacatgagctggatccgccaggctccagggagggggctggagtgggtttcatacattagtgttagtggtgccaccacatactacgcagactctgtgaagggccgattcaccatctccagggacaacgccaagaactcactctatctgcaaatgaacagcctgagagccgaggacgcggccgtgtattactgtgcgagagattttagaacgtattactatgatagtggtgccccgggcttctggggccagggaaccctggtcaccgtctcctcag

SEQ ID NO: 12231 - DNA, 373 bp, Homo sapiens
caggtgcagctgcaggagtcgggcccaggactggtgaagccttcggagaccctgtccctcacctgcactgtctctggtggctccgtcagcagtggtagttactactggagctggatccggcagcccccagggaagggactggagtggattgggtatatctattacagtgggagcaccaactacaacccctccctcaagagtcgagtcaccatatcagtagacacgtccaagaaccagttctccctgaagctgagctctgtgaccgctgcggacacggccgtgtattactgtgcgagagggacgtattacgatttttggagtggttatttatttgactactggggccagggaaccctggtcaccgtctcctcag

SEQ ID NO: 12232 - DNA, 373 bp, Homo sapiens
caggtgcagctgcaggagtcgggcccaggactggtgaagccttcggagaccctgtccctcacctgcactgtctctggtggctccgtcagcagtggtagttactactggagctggatccggcagcccccagggaagggactggagtggattgggtatatctattacagtgggagcaccaactacaacccctccctcaagagtcgagtcaccatatcagtagacacgtccaagaaccagttctccctgaagctgagctctgtgaccgctgcggacacggccgtgtattactgtgcgagagtcatgggtgtgggggttcggggagttagggcctttgactactggggccagggaaccctggtcaccgtctcctcag

SEQ ID NO: 12233 - DNA, 370 bp, Homo sapiens
caggtgcagctggtgcagtctggggctgaggtgaagaagcctggggcctcagtgaaggtttcctgcaaggcatctggatacaccttcaccagctactatatgcactgggtgcgacaggcccctggacaagggcttgagtggatgggaataatcaaccctagtggtggtagcacaagctacgcacagaagttccagggcagagtcaccatgaccagggacacgtccacgagcacagtctacatggagctgagcagcctgagatctgaggacacggccgtgtattactgtgcgagagagcttgggagctactacgtgggttatgatgcttttgatatctggggccaagggacaatggtcaccgtctcttcag

SEQ ID NO: 12234 - DNA, 367 bp, Homo sapiens
gaggtgcagctggtggagactggaggaggcttgatccagcctggggggtccctgagactctcctgtgcagcctctgggttcaccgtcagtagcaactacatgagctgggtccgccaggctccagggaaggggctggagtgggtctcagttatttatagcggtggtagcacatactacgcagactccgtgaagggccgattcaccatctccagagacaattccaagaacacgctgtatcttcaaatgaacagcctgagagccgaggacacggccgtgtattactgtgcgagaggtccaaggggatacagctatggttacggctggttcgacccctggggccagggaaccctggtcaccgtctcctcag

SEQ ID NO: 12235 - DNA, 358 bp, Homo sapiens
gaggtgcagctggtggagtctggaggaggcttgatccagcctggggggtccctgagactctcctgtgcagcctctgggttcttcgtcagtagcaactacatgagctgggtccgccaggctccagggaaggggctggagtgggtctcgcttattaataccgttggtacaacatactacgcagacttcgtgaagggccgattcaccatctccagagacaattccaagaacacggtgtatcttcaaatgaacagcctgagagtcgaggacacggccgtatattactgtgcgagagagcgcatcagcagtacctggtacattgactactggggccagggaaccctggtcaccgtctcctcag

SEQ ID NO: 12236 - DNA, 370 bp, Homo sapiens
caggtgcagctggtggagtctgggggaggcgtggtccagcctgggaggtccctgagactctcctgtgcagcgtctggattcaccttcagtagctatggcatgcactgggtccgccaggctccaggcaaggggctggagtgggtggcagttatatggtatgatggaagtaataaatactatgcagactccgtgaagggccgattcaccatctccagagacaattccaagaacacgctgtatctgcaaatgaacagcctgagagtcgaggacacggctgtgtattactgtgcgagagatcggacttatagaacctcccccctgggctggttcgacccctggggccagggaaccctggtcaccgtctcctcag

SEQ ID NO: 12237 - DNA, 361 bp, Homo sapiens
gaggtgcaactggtggagtctgggggaggcttggtccagcctggggggtccctgagactctcctgtgcagcctctggattcacctttaataggtattggatgagctgggtccgccagggtccagggaaggggctggagtgggtggccaacataaagcaagatggaagtgagaaatactatgtggactctatgaagggccgattcaccatctccagagacaacaccaagaactcactctatctgcaaatgaacagcctgagagccgaggacacggctgtgtatttctgtgcgacagtcaggggttattactaccactactttgactactggggccagggaaccctggtcaccgtctcctcag

SEQ ID NO: 12238 - DNA, 364 bp, Homo sapiens
cagctgcagctgcaggagtcgggcccaggactggtgaagccttcggagaccctgtccctcacctgcactgtctctggtggctccatcagcagtagtagttactactggggctggatccgccagcccccagggaaggggctggagtggattgggagtatctattatagtgggagcacctactacaacccgtccctcaagagtcgagtcaccatatccgtagacacgtccaagaaccagttctccctgaagctgagctctgtgaccgccgcagacacggctgtgtattactgtgcgagacacggtggatacagctatggtaggcttgactactggggccagggaaccctggtcaccgtctcctcag

SEQ ID NO: 12239 - DNA, 364 bp, Homo sapiens
cagctgcagttgcaggagtcgggcccaggactggtgaagccttcggagaccctgtccctcacctgtattgtccctggtggctccatcatcagtagtagtcactactggggctggatccgccagcccccaggggaggggctggattggattgggaatatttattatcgtgggaacacctactacaacccgtccctcaagagtcgagtcaccatatccgtagacacgtccaagaaccagttctccctgaagctgacctctgtgaccgccgcagacacggctatgtattactgtgtgagaccgactggtcattattaccactactttgactcctggggccagggagtcctggtcaccgtctcctcag

SEQ ID NO: 12240 - DNA, 364 bp, Homo sapiens
cagctgcagctgcaggagtcgggcccaggactggtgaagccctcggagaccctgtccctcacctgcactgtctctggtggctccatcagcaattatagtcactactggggctggatccgccagcccccagggaaggggctggagtggattgggagtggctattatagtgggaacacctactacaacccgtccctcaagagtcgagtcaccatatccgtagacacgtccaagagccagttctccctgaacctgaggtctgtgaccgccgcagacacggctgtgtattattgcgcgagacagggcagcagctggtactccacttttgactactggggccagggaaccctggttaccgtctcctcag

SEQ ID NO: 12241 - DNA, 361 bp, Homo sapiens
caggtgcagctgcaggagtcgggcccaggactggtgaagccttcggggaccctgtccctcacctgcgctgtctctggtggctccatcagcagtagtaactggtggagttgggtccgccagcccccagggaaggggctggagtggattggggaaatctatcatagtgggagcaccaactacaacccgtccctcaagagtcgagtcaccatatcagtagacaagtccaagaaccagttctccctgaagctgagctctgtgaccgccgcggacacggccgtgtattactgtgcgagggtgtcctttacagtaagggggtactttgactactggggccagggaaccctggtcaccgtctcctcag

SEQ ID NO: 12242 - DNA, 361 bp, Homo sapiens
gaagtgcagctggtggagtctgggggaggcttggtacagcctggcaggtccctgagactctcctgtgcagcctctggattcacctttgatgattatgccatgcactgggtccggcaagctccagggaagggcctggagtgggtctcaggtattagttggaatagtggtagcataggctatgcggactctgtgaagggccgattcaccatctccagagacaacgccaagaactccctgtatctgcaaatgaacagtctgagagctgaggacacggccttgtattactgtgcaaaacccctttatttacggtgggatgcttttgatatctggggccaagggacaatggtcaccgtctcttcag

SEQ ID NO: 12243 - DNA, 358 bp, Homo sapiens
caggtgcagctacagcagtggggcgcaggactgttgaagccttcggagaccctgtccctcacctgcgctgtctatggtgggtccttcagtggttactactggagctggatccgccagcccccagggaaggggctggagtggattggggaaatcaatcatagtggaagcaccaactacaacccgtccctcaagagtcgagtcaccatatcagtagacacgtccaagaaccagttctccctgaagctgagctctgtgaccgccgcggacacggctgtgtattactgtgcgagagggggctacggtggtaactcgacctttgactactggggccagggaaccctggtcaccgtctcctcag

SEQ ID NO: 12244 - DNA, 360 bp, Homo sapiens
caggtgcagctggtggagtctgggggaggcgtggtccagcctgggaggtccctgagactctcctgtgcagcgtctggattcaccttcagtagctatggcatgcactgggtccgccaggctccaggcaaggggctggagtgggtggcagttatatggtatgatggaagtaataaatactatgcagactccgtgaagggccgattcaccatctccagagacaattccaagaacacgctgtatctgcaaatgaacagcctgagagccgaggacacggctgtgtattactgtgcgagaggatttgacttctactactacggtatggacgtctggggccaagggaccacggtcaccgtctcctca

SEQ ID NO: 12245 - DNA, 363 bp, Homo sapiens
cagctgcagctgcaggagtcgggcccaggactggtgaagccttcggagaccctgtccctcacctgcactgtctctggtggctccatcagaagtaatacttatttctggggctggatccgccagcccccagggaaggggctggagtggattgggaatatgtactacagtgggagcacctactacaacccgttcttcaagagtcgagtcgccatgtccgtggacacgtccaaaaaccagttctccctgaggctgagctctgtgaccgccgcagacacggctgtgtattactgcgggcgtctaactggaacctactaccactacatggacgtctggggcaaagggaccacggtcaccgtctcctca

SEQ ID NO: 12246 - DNA, 364 bp, Homo sapiens
cagctgcagctgcaggagtcgggcccaggactagtgaagacttcggagaccctgtccctcacctgcgctgtcgctggtgactccgtcagcagtagtgcttactactgggcctggatccgccagcccccagggaaggggctggagtggattgggagtatctattatactgggaccacctactacaacccgtccctcaggagtcgagtcaccatttccgtggacacgaccaagaaccagttctccctgaagctgagctctgtgaccgccgcagacacggctgtatattactgtgcgagacaagtacttttggagtggtcccccttcgacccctggggccagggaaccctggtcaccgtctccccag

SEQ ID NO: 12247 - DNA, 364 bp, Homo sapiens
cagctgcagctgcaggagtcgggcccaggactggtgaagccttcggagaccctgtccctcacctgcactgtctctggtggctccatcagcagtagtagttactactggggctggatccgccagcccccagggaaggggctggagtggattgggagtatctattatagtgggagcacctactacaacccgtccctcaagagtcgagtcaccatatccgtagacacgtccaagaaccagttctccctgaagctgagctctgtgaccgccgcagacacggctgtgtattactgtgcgagagagaagttagtaccagctgctcgtttcgacccctggggccagggaaccctggtcaccgtctcctcag

SEQ ID NO: 12248 - DNA, 361 bp, Homo sapiens
caggtgcagctggtgcagtctggggctgaggtgaagaagcctggggcctcagtgaaggtctcctgcaaggcttctggatacaccttcaccagttatgatatcaactgggtgcgacaggccactggacaagggcttgagtggatgggatggatgaaccctaacagtggtaacacaggctatgcacagaagttccagggcagagtcaccatgaccaggaacacctccataagcacagcctacatggagctgagcagcctgagatctgaggacacggccgtgtattactgtgcgacacctacggtgactacgccggatgcttttgatatctggggccaagggacaatggtcaccgtctcttcag

SEQ ID NO: 12249 - DNA, 361 bp, Homo sapiens
caggttcagctggtgcagtctggagctgaggtgaagaagcctggggcctcagtgaaggtctcctgcaaggcttctggttacacctttaccagctacggtatcagctgggtgcgacaggcccctggacaagggcttgagtggatgggatggatcagcgcttacaatggtaacacaaactatgcacagaagctccagggcagagtcaccatgaccacagacacatccacgagcacagcctacatggagctgaggagcctgagatctgacgacacggccgtgtattactgtgcgagggcagtggctgccattaccttgtacttcgatctctggggccgtggcaccctggtcactgtctcctcag

SEQ ID NO: 12250 - DNA, 381 bp, Homo sapiens
gaggtgcagctggtggagtccgggggaggcttagttcagcctggggggtccctgagactctcctgtgcagcctctggattcaccttcagtagctactggatgcactgggtccgccaagctccagggaaggggctggtgtgggtctcacgtattaatagtgatgggagtagcacaaactacgcggactccgacaagggccgattcaccatctccagagacaacgccaagaacacgctgtatctgcaaatgaacagtctgagagccgaggacacggctttatattactgtgtaagagataataggtatagtgggagctactactcattcggctactactacatggacgtctggggcaaagggaccacggtcaccgtctcctca

SEQ ID NO: 12251 - DNA, 361 bp, Homo sapiens
gaagtgcagctggtgcagtccggagcagaggtgaaaaagcccggggagtctctgaggatctcctgtcagggttctggatacagttttgccgactactggatcagttgggtgcgccagatgcccgggaaaggcctggagtggatggggaggattgatcctagtgactcttataccaaatacagcccgtccttcgaaggccacgtcaccttctcagctgacaagtccatcaacactgcctacctgcagtggagcagcctgaaggcctcggacaccgccatatattactgtgcgagacttcataccagcagctggaactggttcgacccctggggccagggaaccctggtcatcgtctcctcag

SEQ ID NO: 12252 - DNA, 384 bp, Homo sapiens
cagctgcagctgcaggagtcgggcccaggactggtgaagccttcggagaccctgtccctcacctgcactgtctctggtggctccatcagcagtagtagttactactggggctggatccgccagcccccagggaaggggctggagtggattgggagtatctattatagtgggagcacctactacaacccgtccctcaagagtcgagtcaccatatccgtagacacgtccaagaagcagttctccctgaagctgagctctgtgaccgccgcagacacggctgtgtattactgtgcgagacattatacggcgagtgggagctaccaatactaccactactactacatggacgtctggggcaaagggaccacggtcaccgtctcctca

SEQ ID NO: 12253 - DNA, 381 bp, Homo sapiens
caggtgcagctggtggagtctgggggaggcgtggtccagcctgggaggtccctgagactctcctgtgcagcctctggattcaccttcagtagctatggcatgcactgggtccgccaggctccaggcaaggggctggagtgggtggcagttatatcatatgatggaagtaataaatactatgcagactccgtgaagggccgattcaccatctccagagacaattccaagaacacgctgtatctgcaaatgaacagcctgagagctgaggacacggctgtgtattactgtgcgaatgaggggatagcatattgtggtggtgactgctaccccagctacggtatggacgtctggggccaagggaccacggtcaccgtctcctca

SEQ ID NO: 12254 - DNA, 357 bp, Homo sapiens
gaggtgcagctggtggagtctgggggaggcctggtcaagcctggggggtccctgagactctcctgtgcagcctctggattcaccttcagtagttatagcatgaactgggtccgccaggctccagggaaggggctggagtgggtctcatccattagtagtactaatagttacatatactatgcagactcagtgaggggccgattcaccatctccagagacaacgccgacaactcactgtatctgcaaatgaacagcctgagacccgaggacacggctatatattactgtgcgagagatctgtggaacgatgtccacttcttcgacccctggggccagggaaccctggtcaccgtctcc

SEQ ID NO: 12255 - DNA, 358 bp, Homo sapiens
caggtgcagctgcaggagtcgggcccaggactggtgaagccttcggagaccctgtccctcacctgcactgtctctggtggctccatcagtagttactactggagctggatccggcagcccccagggaagggactggagtggattggctatatctattacagtgggagcaccaattacaacccctccctcaagagtcgagtcaccatatcagtcgacacgtccaagaaccagttctccctgaggctgagctctgtgaccgctgcggacacggccgtttattactgtgcgagggcttgtagtggtggtagctgctacttcggcccctggggccagggaaccctggtctccgtctcctcag

SEQ ID NO: 12256 - DNA, 378 bp, Homo sapiens
gaggtgcagctggtggagtctgggggaggcttggtacagcctggggggtccctgagactctcctgtgcagcctctggattcaccttcagtagctacgacatgcactgggtccgccaagctacaggaaaaggtctggagtgggtctcagctattggtactgctggtgacacatactatccaggctccgtgaagggccgattcaccatctccagagaaaatgccaagaactccttgtatcttcaaatgaacagcctgagagccggggacacggctgtgtattactgtgcaagagggattactatggttcggggagttatgcgatactactactacggtatggacgtctggggccaagggaccacggtcaccgtctcctca

SEQ ID NO: 12257 - DNA, 381 bp, Homo sapiens
gaggtgcagctggtgcagtctggagcagaggtgaagaagcccggggagtctctgaagatctcctgtaagggttctggatacacctttaccaactactggatcgcctgggtgcgccagatgcccgggaaaggcctggagtggatggggatcatctatcctggtgactctgataccagatacagcccgtccttccaaggccaggtcaccatttcagccgacaagtccatcagcaccgcctacctgcagtggcgcagcctgaagtcctcggacaccgccatgtattactgtgcgagacatgtatcaccgtattactatggttcggggagttatagggccggtatggacgtctggggccaagggaccacggtcaccgtctcatca

SEQ ID NO: 12258 - DNA, 382 bp, Homo sapiens
gaggtgcagctggtgcagtctggagcagaggtgaaaaagcccggggagtctctgaagatctcctgtaagggttctggatacagctttaccagctactggatcggctgggtgcgccagatgcccgggaaaggcctggagtggatggggatcatctatcctggtgactctgataccagatacagcccgtccttccaaggccaggtcaccatctcagccgacaagtccatcagcaccgcctacctgcagtggagcagcctgaaggcctcggacaccgccatgtattactgtgcgagagtatgcggttacgatttttggagtggttattttagggcgggctggttcgacccctggggccagggaaccctggtcaccgtctcctcag

SEQ ID NO: 12259 - DNA, 378 bp, Homo sapiens
caggtgcagctacagcagtggggcgcaggactgttgaagccttcggagaccctgtccctcacatgcgttgtctatggtgggtccttcagtggttactactggagctggatccgccagcccccagggaaggggctggagtggattggggaaatcaatcatagtggaagcaccaactacaacccgtccctcaagagtcgagtcaccatatcactagacacgtccaagaaccagttctccctgaagctgagctctgtgaccgccgcggacacggctgtgtattactgtgcgagagcaagaaaactggaacgactaccggggtactactactactactacatggacgtctggggcaaagggaccacggtcaccgtctcctca

SEQ ID NO: 12260 - DNA, 382 bp, Homo sapiens
gaggtgcagctggtggagtctgggggaggcctggtcaagcctggggggtccctgagactctcctgtgcagcctctggattcaccttcagtagctatagcatgaactgggtccgccaggctccagggaaggggctggagtgggtctcatccattagtagtagtagtagttacatatactacgcagactcagtgaagggccgattcaccatctccagagacaacgccaagaactcactgtatctgcaaatgaacagcctgagagccgaggacacggctgtgtattactgtgcgagaggccgcctactaggatattgtagtggtggtagctgctacagagactttgactactggggccagggaaccctggtcaccgtctcctcag

SEQ ID NO: 12261 - DNA, 379 bp, Homo sapiens
caggtgcagctacagcagtggggcgcaggactgttgaagccttcggagaccctgtccctcacctgcgctgtctatggtgggtccttcagtggttactactggatctggatccgccagcccccagggaaggggctggagtggattggggaaatcactcatagtggaagcaccaactacaacccgtccctcaagagtcgagtcaccatatcactagacacgtccaagaaccagttctccctgaagctgagctctatgaccgccgcggacacggctgtgtattactgtgcgcgaggccatattgtactaatggtgtatccatctagggccaggacctactttgactactggggccagggaaccctggtcaccgtctcctcag

SEQ ID NO: 12262 - DNA, 379 bp, Homo sapiens
caggtgcagctacagcagtggggcgcaggactgttgaagccttcggagaccctgtccctcacctgcgctgtctatggtgggtccttcagtggttactactggagctggatccgccagcccccagggaaggggctggagtggattggggaaatcaatcatagtggaagcaccaactacaacccgtccctcaagagtcgagtcaccatatcagtagacacgtccaagaaccagttctccctgaagctgagctctgtgaccgccgcggacacggctgtgtattactgtgcgagaggcagatattgtagtggtggtagctgctacccaccccggggttggttcgacccctggggccagggaaccctggtcaccgtctcctcag

SEQ ID NO: 12263 - DNA, 382 bp, Homo sapiens
gaggtgcagctggtggagtctgggggaggcttggtacagcctggggggtccctgagactctcctgtgcagcctctggattcacctttagtagctatgccatgagttgggtccgccaggctccagggaaggggctggagtgggtctcagcaattagtggtagtggtggtgtcacatactacgcagactccgtgaagggccggttcaccatctccagagacaattccaagagcacgctgtatctgcaaatgagcagcctgagagccgaggacacggccgtgtattactgtgcggtacacggagtggctggtacagggtctttctccgtaactcccaggcgttttgactcctggggccagggaaccctggtcaccgtctcctcag

SEQ ID NO: 12264 - DNA, 349 bp, Homo sapiens
caggtgcagctgcaggagtcgggcccaggactggtgaagccttcggagaccctgtccctcacctgcactgtctctggtggctccatcagtagttactactggagctggatccggcagcccccagggaagggactggagtggattgggtatatctattacagtgggagcaccaactacaacccctccctcaagagtcgagtcaccatatcagtagacacgtccaagaaccagttctccctgaagctgagctctgtgaccgctgcggacacggccgtgtattactgtgcgagagatgggaacgacggttttgactactggggccagggaaccctggtcaccgtctcctcag

SEQ ID NO: 12265 - DNA, 385 bp, Homo sapiens
caggtcaccttgagggagtctggtcctgcgctggtgaaacccacacagaccctcacactgacctgcaccttctctgggttctcactcagcactagtggaatgtgtgtgagctggatccgtcagcccccagggaaggccctggagtggcttgcacgcattgatggggatgatgataaatactacagcacatctctgaagaccaggctcaccatctccaaggacacctccaaaaaccaggtggtccttacaatgaccaacatggaccctgtggacacagccacgtattactgtgcacggacacgtatagcagcagctggtattcttggcggaaagatatactactttgactactggggccagggaaccctggtcaccgtctcctcag

SEQ ID NO: 12266 - DNA, 385 bp, Homo sapiens
cagctgcagctgcaggagtcgggcccaggactggtgaagccttcacagaccctgtccctcacctgcactgtctctggtggctccatcagcagtggtggttactactggacctggatccgccagcacccagggaagggcctggagtggattgggtacatttataacagtgggaggacctactacaacccgtccctcaagagtcgagttaccatatcagcagacacgtctaagaatcagttctccctgaggctgacctctgtgactgccgcggacacggccgtatattactgtgcgcgagattcgttttaccatgagaatagtgcttatccagagtacagctggttcgacccctggggccagggaaccctggtcaccgtctcctcag

SEQ ID NO: 12267 - DNA, 349 bp, Homo sapiens
gaggtgcagctggtggagtctgggggaggcttggtccagcctggggggtccctgagactctcctgtgcagcctctggattcaccgttagtagcaactacatgagctgggtccgccaggctccagggaaggggctggagtgggtctcagttatttatagcggtggtagcacatactacgcagactccgtgaagggcagattcaccatctccagagacaattccaagaacacgctgtatcttcaaatgaacagcctgagagccgaggacacggctgtgtattactgtgcgagagcagacgactacataatggacgtctggggcaaagggaccacggtcaccgtctcctcag

SEQ ID NO: 12268 - DNA, 352 bp, Homo sapiens
gaggtgcagctggtggagtctgggggaggcttggtacagcctggagggtccctgagactctcctgtgcagcctctggattcaccttcagcagttatgaaatgaactgggtccgccaggctccagggaaggggctggagtgggcttcatacattagtagtagtggtagtaccatatactacgcagactctgtgaagggccgattcaccatctccagagacaacgccaagaactcactgtatctgcaaatgaacagcctgagagccgaggacacggctgtttattactgtgcgagaggacaaggtttgttggtcaacccctggggccagggaaccctggtcaccgtctcctcag

SEQ ID NO: 12269 - DNA, 346 bp, Homo sapiens
gaggtgcagttggtggagactggaggaggcttgatccagcctggggggtccctgagactctcctgtgcagcctctgggttcagcgtcagtagtaaatacatgctctgggtccgccagcctccggggaaggggctggagtgggtctcagttacttttaccgatgggagtacatcctatgcaaactccgtgaaggggcgattcaccatctccagagacaattccaagaacacgctgtctcttcaaatgaatagcctgagagccgaggacacggccatgtattactgtgcgagagggggcagcacaccacctcactggggccagggaaccctggtcaccgtctcctcag

SEQ ID NO: 12270 - DNA, 355 bp, Homo sapiens
caggtcaccttgagggagtctggtcctgcgctggtgaaacccacacagaccctcacactgacctgcaccttctctgggttctcactcagcactagtggaatgtctgtaaactggatccgtcagcccccagggaaggccctggagtggcttgcactcattgattggggtgatgaaaaatactacagcacatctctgaggtccaggctcaccatctcgaaggacacctccaaaaaccaggtggtccttacaatgaccaacatggaccctgtggacacagccacgtattactgtgcacggaccttgaggcgggactttgactactggggccagggaaccctggtcaccgtctcctcag

SEQ ID NO: 12271 - DNA, 349 bp, Homo sapiens
caggtccagctggtacagtctggggctgaggtgaagaagcctggggcctcagtgaaggtctcctgcaaggtttccggacacaccctcactaaattatccatgcactgggtgcgacaggctcctggaaaagggcttgagtggatgggaggttttgatcctgaagatggtgaagcaatcttcgcacagaagttccagggcagagtcaccatgaccgaggacacatctacagacacagcctatatggagctgagcagcctgagatctcaggacacggccgtgtattactgtgcaaagggggggtgggagctactcttctggggccagggaaccctggtcaccgtctcctcag

SEQ ID NO: 12272 - DNA, 346 bp, Homo sapiens
gaggtgcagctggtggagtctgggggaggcttggtccagcctggggggtccctgagactctcctgtgcagcctctggattcaccgtcagtagcaactacatgagctgggtccgccaggctccagggaaggggctggagtgggtctcagttatttatagcggtggtagcacatactacgcagactccgtgaagggcagattcaccatctccagagacaattccaagaacacgctgtatcttcaaatgaacagcctgagagccgaggacacggctgtgtattactgtgcgagaggaattcgggggtttgactactggggccagggaaccctggtcaccgtctcctcag

SEQ ID NO: 12273 - DNA, 346 bp, Homo sapiens
caggtgcagctacagcagtggggcgcaggactgttgaagccttcggagaccctgtccctcacctgcactgtctctggtggctccatcagtagttactactggagctggatccggcagcccgccgggaagggactggagtggattgggcgtatctataccagtgggagcaccaactacaacccctccctcaagagtcgagtcaccatgtcagtagacacgtccaagaaccagttctccctgaagctgagctctgtgaccgccgcggacacggccgtgtattactgtgcgaggggggaaagtgcttttgatatctggggccaagggacaatggtcaccgtctcttcag

SEQ ID NO: 12274 - DNA, 355 bp, Homo sapiens
gaggtgcagctggtggagtctgggggaggcttggtccagcctggggggtccctgaaactctcctgtgcagcctctgggttcaccttcagtggctctgctatgcactgggtccgccaggcttccgggaaagggctggagtgggttggccgtattagaaacaaagctaacaattacgcgacagcatatgctgcgtcggtgaaaggcaggttcaccatctccagagatgattcaaagaacacggcgtatctgcaaatgaacagcctgaaaaccgaggacacggccgtgtattactgtgctagacagggggattatagcagttattggggccagggaaccctggtcaccgtctcctcag

SEQ ID NO: 12275 - DNA, 358 bp, Homo sapiens
gaggtgcagctggtggagtctgggggaggcttggtacagcctggagggtccctgagactctcctgtgcagcctctggattcaccttcagtagttatgaaatgaactgggtccgccaggctccagggaaggggctggagtgggtttcatacattagtagtagtggtagtaccatatactacgcagactctgtgaagggccgattcaccatctccagagacaacgccaagaactcactgtatctgcaaatgaacagcctgagagccgaggacacggctgtttattactgtgcgagtcttggatacagctatggttaccgggggacgtggggccagggaaccctggtcaccgtctcctcag

SEQ ID NO: 12276 - DNA, 361 bp, Homo sapiens
caggtgcagctgcaggagtcgggcccaggactggtgaagccttcacagaccctgtccctcacctgcactgtctctggtggctccatcagcagtggtggttactactggagctggatccgccagcacccagggaagggcctggagtggattgggtacatctattacagtgggagcacctactacaacccgtccctcaagagtcgagttaccatatcagtagacacgtctaagaaccagttctccctgaagctgagctctgtgactgccgcggacacggccgtgtattactgtgcgagatcgggagtggctacgaacccctttgactactggggccagggaaccctggtcaccgtctcctcag

SEQ ID NO: 12277 - DNA, 349 bp, Homo sapiens
gaggtgcagctggtggagtctgggggaggcttggtccagcctggggggtccctgagactctcctgtgcagcctctggattcacctttagtagatattggatgaactgggtccgccaggctccagggaaggggctggagtgggtggccaacataaaggaagatggaagtgagaaatactatgtggactctgtgaagggccgattcaccatctccagagacaacgccaagaactcactgtatctgcaaatgaacagcctgagagccgaggacacggctgtgtattactgtgcgaggagagttggcaacactgactcctggggccagggaaccctggtcaccgtctcctcag

SEQ ID NO: 12278 - DNA, 355 bp, Homo sapiens
caggtgcagctgcaggagtcgggcccaggactggtgaagccttcggagaccctgtccctcacctgcactgtctctgctggctccatcagtagttactactggagctggatccggcagcccccagggaagggactggagtggattgggtttgtctattacagtgggagcaccaactacaacccctccctcaagagtcgagtcaccatatctatggacacgtccaagaaccagttctccctgaagctgacctctgtgaccgctgcggacacggccgtgtatttctgtgcgagaggccctcggagtggctacgattttgagtattggggccagggaaccctggtcaccgtctcctcag

SEQ ID NO: 12279 - DNA, 355 bp, Homo sapiens
gaggtgcagctggtggagtctgggggagccttggtccagcctggggggtccctgagactctcctgtgcagcctctggattcaccgtcagtagcaacttcatgagctgggtccgccaggctccagggaaggggctggagtgggtctcagttatttatagcggtggtacctcatactacgcagactccgtgaagggcagattcaccatctccagagacaattccaagaatacgctgtatcttcagatgatcagcctgagagccgaggacacggctgtatattactgtgcgagagatcgtgtagcaggtcgtccgttggactactggggcctgggaaccctggtcaccgtctcctcag

SEQ ID NO: 12280 - DNA, 355 bp, Homo sapiens
gaggtgcagctggtggaatctgggggaggcttggtccagcctggggggtccctgcgactctcctgtgcagcctctggaatcaccgtcagtgacaactacatgagctgggtccgccaggctccagggaagggactggagtgggtctcagttatttatagaagtggtgccacatacaacgcagactccgtgaagggcagattcaccatctccagagacaattccaacaacgcgctgtatcttcaaatgaacagcctgagaggcgaggacacggctatttattactgtgcgagaaggttaaacactggctggcaccatgactgctggggccagggaaccctggtcaccgtctcctcag

SEQ ID NO: 12281 - DNA, 355 bp, Homo sapiens
gaggtgcagctggtggagtctggaggaggcttgatccagcctggggggtccctgagactctcctgtgcagcctctgagttcaccgtcagtaacagctacatgacctgggtccgccaggctccagggaaggggctggagtgggtctcagttatttatagaggtggtaacacatactacgcagactccgtgcagggccgattcaccatctccagagacaattccaagaacacactgtttcttcagatgagcaccctgagagccgaggacacggccgtgtattactgtgcgaggaggtctagtagtagttggtccctgcccctctggggccagggaaccctggtcatcgtctcctcag

SEQ ID NO: 12282 - DNA, 358 bp, Homo sapiens
caggtgcagctggtgcagtctggggctgaggtgaagaagccaggggcctcagtgaaggtttcctgcaaggcatctggatacacgctcaccagttaccatatccagtgggtgcgacaggcccctggacaagggcttgagtggatgggaacattccaccctggtaatggtcagacaaactacgcacggaagttccagggcagagtcaccatgactagggacacgtccacgagcacagtctacatggagctgagcagcctgatatctgaagacacggccgtctattactgtgcgagagagcccccggcagcctgctactttgactactggggccagggaaccctggtcaccgtctcctcag

SEQ ID NO: 12283 - DNA, 357 bp, Homo sapiens
gaggtgcagctggtggagtctgggggaggcttggtacagcctggggggtccctgagactctcctgtgcagcctctggattcacctttagcagctatgccatgagctgggtccgccaggctccagggaaggggctggagtgggtctcagctattagtggtagtggtggtagcacatactacgcagactccgtgaagggccggttcaccatctccagagacaattccaagaacacgctgtatctgcaaatgaacagcctgagagccgaggacacggccgtatattactgtgcgaaagacaatgactactactactacatggacgtctggggcaaagggaccacggtcaccgtctcctca

SEQ ID NO: 12284 - DNA, 358 bp, Homo sapiens
caggtgcagctgcaggagtcgggcccaggactggtgaagccttcggggaccctgtccctcacctgcgctgtctctggtggctccatcagcagtagtaactggtggagttgggtccgccagcccccagggaaggggctggagtggattggcgaaatctatcatagtgggagcagcagctacaacccgaccctcaagagtcgagtcaccatatcagtggacaagtccaagaaccagttctccctgaatctgagctccgtgaccgccgcggacacggccgtgtacttctgtgcgagagcaagcagtggtcttggtgcttttgatatctggggccaagggacaatggtcaccgtctcttcag

SEQ ID NO: 12285 - DNA, 358 bp, Homo sapiens
gaagtgcagctggtgcagtccggagcagaggtgaaaaagcccggggagtctctgaggatctcctgtaagggttctggatacagctttaccacctactggatcaactgggtgcgccagatgcccgggaaaggcctggagtggatggggaggattgatcctagtgactcttataccaactacagcccgtccttccaaggccacgtcaccatctcagctgacaagtccatcagcactgcctacctgcagtggagcagcctgaaggcctcggacaccgccatgtattactgtgcgagacggaactatggttcggggagttacgactactggggccagggaaccctggtcaccgtctcctcag

SEQ ID NO: 12286 - DNA, 364 bp, Homo sapiens
caggtgcagctacagcagtggggcgcaggactgttgaagccttcggagaccctgtccctcatctgcggtgtctatggtgggtccttcagtgattactactcgagctggatccgccagcccccagggaaggggctggagtggattggggaaatcaatcatagtggaggcaccaactacaatagtcactcaagagtcgagtcaccatatcggtagacacgtccaagaaccagttctccctgaaactgagctctgtgaccgccgcggacacggctgtgtattactgtgcgagagttttattttgtggtggtgactgctatcaacgttgactactggggccagggaaccctggtcaccgtctcctcag

SEQ ID NO: 12287 - DNA, 355 bp, Homo sapiens
caggtgcaactggtgcagtctggggctgaggtgaagaaccctggggcctcagtgaaggtctcttgcaaggcttctggatacatcttcaccggctactatatacactgggtgcgacaggcccctggacaagggcttgagtggatgggatggatcaaccctaacagtggttacacaatctatgcacagaactttcagggcagggtcaccatgaccacggacacgtccatcaacacagcctacatggaattgagcagcctgagatctgacgacacggccgtgtattactgtgcgagagggattccgtggccgggcattgactactggggccagggaaccctggtcaccgtctcctcag

SEQ ID NO: 12288 - DNA, 357 bp, Homo sapiens
gaggtgcagctggtgcagtctggagcagaggtgaaaaagcccggggagtctctgaagatctcctgtaagggttctggatacagctttaccagctactggatcggctgggtgcgccagatgcccgggaaaggcctggagtggatggggatcatctatcctggtgactctgataccagatacagcccgtccttccaaggccaggtcaccatctcagccgacaagtccatcagcaccgcctacctgcagtggagcagcctgaaggcctcggacaccgccatgtattactgtgcgagacatggttaccgattactcggtatggacgtctggggccaagggaccacggtcaccgtctcctca

SEQ ID NO: 12289 - DNA, 355 bp, Homo sapiens
gaggtgcagctggtggagtccgggggaggcttagttcagcctggggggtccctgagactctcctgtgcagcctctggattcaccttcagtagctactggatgcactgggtccgccaagctccagggaaggggctggtgtgggtctcacgtattaatagtgatgggagtagtccaagctacgcggactccgtgaagggccgattcaccatctccagagacaacgccaagaacacgctgtatctgcaaatgaacagtctgagagccgaggacacggctgtgtattactgtgtaagagccctagggtacggggcctttgactactggggccagggaaccctggtcaccgtctcctcag

SEQ ID NO: 12290 - DNA, 358 bp, Homo sapiens
cagctgcagctgcaggagtcgggcccaggactggtgaagccttcggagaccctgtccctcacctgcactgtctctggtggctccatcagcagtagtagttactactggggctggatccgccagcccccagggaaggggctggagtggattgggagtatctattatagtgggagcacctactacaacccgtccctcaagagtcgagtcaccatatccgtagacacgtccaagaaccagttctccctgaagctgagctctgtgaccgccgcagacacggctgtgtattactgtgcgagagtgactacggtgactacgccggactactggggccagggaaccctggtcaccgtctcctcag

SEQ ID NO: 12291 - DNA, 358 bp, Homo sapiens
gaggtgcagctggtggagtctgggggaggcttggtacagcctggggggtcccggagactctcctgtgcagtctctggattcagttttagcagttttgccatgagctgggtccgccaggctccggggaaggggctggagtgggtctcaggtattagtggtagtggtactagcacatactacgtggactccgtgaagggccggttcaccatctccagagacaattcccagaacacactgtatctgcaaatgaacagcctgagagccgaggacacggccatatattactgtgcgaagtattacgatttttggagtggccctgtctactggggccagggaaccctggtctccgtctcctcag

SEQ ID NO: 12292 - DNA, 358 bp, Homo sapiens
gaggtgcacctggtggagtctgggggaggcttggtacagcctggggggtccctgagactctcctgtgcagcctcaggattcacctttaacgactatgccatgacttgggtccgccaggctccagggaaggggctggagtgggactctactattgatgggagtggtacgagcacatggtacgcagactccgtgaggggccggttcaccatctccagagacaatgccaagaatacggtgtatttgcaaatgaacagcctgagagccgaggacacggccctatatttctgtgcgaaacatcgtgatgtctacaattcctttgacttctggggccagggaaccctggtcaccgtctcctcag

SEQ ID NO: 12293 - DNA, 358 bp, Homo sapiens
gaggtgcagctgttggagtctgggggaggcttggtacagcctggggggtccctgagactctcctgtgcagcctctggattcacatttagaagttttgccatgaactgggtccgccaggctccagggaaggggctggagtgggtctcaggtattagtgagagtggtgatagtacatattacgcaggctccctgaagggccgggtcaccatctccagagacaattcccagaatacgctgtatctgcaaatgatcagcctgacagtcgaggacacggctgtatattactgtgcgaggcgtatcggtgggatctgggcctttgaccagtggggccagggaaccctggtcaccgtctcctcag

SEQ ID NO: 12294 - DNA, 358 bp, Homo sapiens
gaggtgcagctggtggagtctgggggagacttggtacagcctggggggtccctgagactctcctgtgcagcctctggattcacctttagcacgtatgccatgacctgggtccgccaggctccagggaaggggctggagtgggtctctgaaattagtggtagtggtggtaggacatactacgcagactccgtggagggccgattcaccatctccagagacaattccaagaacacgctgtatctgcaaatgaacagcctgagagccgaggacacggccctatattactgtacgaaaccccatgattacgtttggggggtagacctctggggccagggaaccctggtcaccgtctcctcag

SEQ ID NO: 12295 - DNA, 392 bp, Homo sapiens
gaggtgcacctggtggagtctgggggaggcttggtacagcctggggggtccctgagactctcctgtgcagcctctggattcacctttagcagctatgccatggcctgggcccgccaggctccagggaaggggctggagtgggtctcagcaattagtgaaagtggtgatcagaaatattatgtagacgccctgaagggccggttcaccatctccagagacaattccaagaacacgctgtatctgcaaatgaacagcctgagagccgaggacacgggtgtatattactgtgcgagagagaaccaaccctgtgagtgatggaagttgctacacctcactcttgcaactctggcatggacgtctggggccaggggaccccggtcaccgtctcctca

SEQ ID NO: 12296 - DNA, 358 bp, Homo sapiens
caggtcaccttgagggagtctggtcctgcgctggtgaaacccacacagaccctcacactgacctgcaccttctctgggttctcactcagcactagtggaatgtgtgtgagctggatccgtcagcccccagggaaggccctggagtggcttgcacgcattgattgggatgatgataaatactacagcacatctctggagaccaggctcaccatctccaaggacacgtccaaaaaccaggtggtccttacaatgaccaacatggaccctgtggacacagccacgtattactgtgtcagggtcactccttctcttgggcttgactactggggccagggaaccctggtcaccgtctcctcag

SEQ ID NO: 12297 - DNA, 384 bp, Homo sapiens
caggtgcagctggtggagtctgggggaggcgtggtccagcctgggaggtccctgagactctcctgtgcagcctctggattcaccttcagtagctatggcatgcactgggtccgccaggctccaggcaaggggctggagtgggtggcagttatatggtatgatggaagtaataaatactatgcagactccgtgaagggccgattcaccatctccagagacaattccaagaacacgctgtatctgcaaatgaacagcctgagagccgaggacacggctgtgtattactgtgcgagatccattcgagcatcgtattactatggttcggggagagcaaactactacatggacgtctggggcaaagggaccacggtcaccgtctcctca

SEQ ID NO: 12298 - DNA, 390 bp, Homo sapiens
gaggtgcagctggtggagtctgggggaggcttggtaaagcctggggggtccctgagactctcctgtgcagcctctggattcactttcagaaacgcctggatgagctgggtccgccaggctccagggaaggggctggagtgggttggccgtattaaaagcaaaactgatggtgggacaacagactacgctgcacccgtgaaaggcagattcaccatctcaagagatgattcaaaaaacacgctgtctctgcaaatgaacagcctgaaaaccgaggacacagccgtgtattactgtaccacaggcttggggtattacgatttttggagtggttttttgcctgttctcggtatggacgtctggggccaagggaccacggtcaccgtctcctca

SEQ ID NO: 12299 - DNA, 352 bp, Homo sapiens
gaggtgcaggtggtggagtctgggggagacttggtccagcctggggggtccctgagactctcctgtgcagcctctggattcaccgtcataaccaactacatgagttgggtccgccaggctccagggaaggggctggaatgcgtctcaattatttatagtggtattagtacatcttacgcagactccgtgaagggcagattcaccatctccagagacaattccaagaacaccgtgtatcttcaaatgaacaccctgagagccgaggacacggctctctattactgtgcgggccgaggaccctggggtgcttttgacatctggggccaagggacaatggtcaccgtctcttcag

SEQ ID NO: 12300 - DNA, 387 bp, Homo sapiens
caggtcaccttgagggagtctggtcctgcgctggtgaaacccacacagaccctcacactgacctgcaccttctctgggttctcactcagcactagtggaatgtgtgtgagctggatccgtcagcccccagggaaggccctggagtggcttgcacgcattgattgggatgatgataaatactacagcacatctctgaagaccaggctcaccatctccaaggacacctccaaaaaccaggtggtccttacaatgaccaacatggaccctgtggacacagccacgtattactgtgcacggaccggagaaatacactacggtgactacggaaagtacttctactattacatggacgtctggggcaaagggaccacggtcaccgtctcctca

SEQ ID NO: 12301 - DNA, 384 bp, Homo sapiens
caggttcagctggtgcagtctggggctgaggtgaagaagcctggggcctcagtgaaggtctcctgcaagacttctggttacgactttgtcagctatggtttcagctgggtgcgacaggcccctggacaagggcttgagtggatgggatggatcagcggttacaatggttacaaaaaatatgcacagaagctccagggcagagtcaccatgaccacagacacatccacgagcacagcctacatggagctgaggagcctgagatctgacgacacggccgtatattattgtgcgagagattgtagtagtgccagctgccaaagggggtcctattactactacggcttggatgtctggggccaagggaccacggtcaccgtttcctca

SEQ ID NO: 12302 - DNA, 385 bp, Homo sapiens
gaggtgcagctggtggagtctgggggaggcttggtacagcctggggggtccctgagactctcctgtgcagcctctcaattcatctttagcagctatgccatgagctgggtccgccaggctccagggaaggggctggagtgggtctcaactattagtggtagtggtggtagcacatactacgcagactccgtgaagggccggttcaccatctccagagacagttccaagaacacgctgtatctccaaatgaacagcctgagagccgaggacacggccgtatattactgtgcgaaagggaaaggctacaatcgcgacccgctgtggggtggcggggacgcccaatttgactactggggccagggaaccctggtcaccgtctcctcag

SEQ ID NO: 12303 - DNA, 385 bp, Homo sapiens
gaggtgcagctggtgcagtctggagcagaggtgaaaaagcccggggagtctctgaagatctcctgtaagggttctggatacagctttaccaactactggatcggctgggtgcgccagatgcccgggaaaggcctggagtggatggggatcatgtatcctggtgactctgatagcagatacagcccgtccttccaaggccaggtcaccatgtcagccgacaagtccctcagcaccgcccacctgcagtggagcagcctgaaggcctcggacaccgccatgtattactgtgcgagacgtataccgaccgaatatagcagtggctggtaccactggggggctgcttttgatatctggggccaagggacaatggtcaccgtctcttcag

SEQ ID NO: 12304 - DNA, 352 bp, Homo sapiens
gaggtgcagctggtggagtctgggggaggcttggtaaagcctggggggtcccttagactctcctgtgcagcctctggattcactttcagtaacgcctggatgagctgggtccgccaggctccagggaaggggctggagtgggttggccgtattaaaaccgaaactgatggtgggacaacaaactacgctgcacccgtgaaagccagattcaccatctcaagagatgattcaaaaaacacactgtatctgcaaatgaacagcctgaaaaccgaggacacagccgtgtattactgtaccacagacagctatggtttctactggggccagggaaccctggtcaccgtctcctcag

SEQ ID NO: 12305 - DNA, 382 bp, Homo sapiens
caggtgcagctgcaggagtcgggcccaggactggtgaagccttcggagaccctgtccctcacctgcactgtctctggtggctccatcagtagttactactggagctggatccggcagcccccagggaagggactggagtggattgggtatatctattacagtgggagcaccaactacaacccctccctcaagagtcgagtcaccatatcagtagacacgtccaagaaccagttctccctgaagctgagctctgtgaccgccgcagacacggccgtgtattactgtgcgagcgccgggggggcttcgtatagcagcagctggtacgccgggggtaactggttcgacccctggggccagggaaccctggtcaccgtctcctcag

SEQ ID NO: 12306 - DNA, 382 bp, Homo sapiens
caggtgcagctgcaggagtcggggccaggactggtgaagccttcggagaccctgtccctcacctgcactgtctctggtggctccatcagtggttactactggagctggatccggcagcccccaggggagggactggagtggattgggtatatctattacagtgggagcaccaactacaacccctccctcgagagtcgagtcaccatatcagcagacacgcccaagaaccagttctccctgaggctgagctctgtgaccgctgcggacacggccgtgtattactgtgcgagagatagttactttgatactagtggttatcagaggagggggtacaactggttcgacccctggggccagggaaccctggtcaccgtctcctcag

SEQ ID NO: 12307 - DNA, 363 bp, Homo sapiens
gaagtgcagctggtggagtctgggggaggcttggtacagcctggcaggtccccgagactctcctgtgcagcctctggattcacctttgatgattatgcccaacactgggtccgacaagctccagggaagggcctggagtgggtctcaagtattagttggaatagtactaacataggctatgcggactctgtgaagggccgattcaccatctccagagacaacgccaagaactccctgtatctgcaaatgaacagtctgagagctgaggacacggccttgtcttactgtccaaaagatccgttggactagtaccatctgctcctgactactggggccagggaaccctgctccccgtctcctcag

SEQ ID NO: 12308 - DNA, 382 bp, Homo sapiens
gaggtgcagctggtggagtctgggggaggcttggtccagcctggggggtccctgagactctcctgtgcagcctctggattcaccgtcagtagcaactacatgagctgggtccgccaggctccagggaaggggctggagtgggtctcaattatttatagcggtggtaccacatactacgcagactccgtgaagggcagattcaccatctccagagacaattccaagaacgccctgtatcttcaaatgaacagcctgagagtcgaggacacggctgtgtattactgtgcgagagacacgtatggttcggggagttattataaccttccatcggcccactactttgaccactggggccagggaaccctggtcaccgtctccacag

SEQ ID NO: 12309 - DNA, 390 bp, Homo sapiens
gaggtgcagctgttggagtctgggggaggcttggtacagcctggggggtccctgagactctcctgtgcagcctctggattcacctttagcagctatgccatgagctgggtccgccaggctccagggaaggggctggagtgggtctcagctattagtggtagtggtggtagcacatactacgcagactccgtgaagggccggttcaccatctccagagacaattccaagaacacgctgtatctgcaaatgaacagcctgagagccgaggacacggccgtatattactgtgcgaaagcaaaggagcccgatttttggagtggttattatgacaactactactactacggtatggacgtctggggccaagggaccacggtcaccgtctcctca

SEQ ID NO: 12310 - DNA, 322 bp, Homo sapiens
gccatccggatgacccagtctccatcctcattctctgcatctacaggagacagagtcaccatcacttgtcgggcgagtcagggtattagcagttatttagcctggtatcagcaaaaaccagggaaagcccctaagctcctgatctatgctgcatccactttgcaaagtggggtcccatctaggttcagcggcagtggatctgggacagatttcactctcaccatcagctgcctgcagtctgaagattttgcaacttattactgtcaacagtattatagttaccctcggaccttcggccaagggacacgactggagattaaac

SEQ ID NO: 12311 - DNA, 322 bp, Homo sapiens; identical to SEQ ID NO: 12310

SEQ ID NO: 12312 - DNA, 322 bp, Homo sapiens; identical to SEQ ID NO: 12310

SEQ ID NO: 12313 - DNA, 322 bp, Homo sapiens; identical to SEQ ID NO: 12310

SEQ ID NO: 12314 - DNA, 322 bp, Homo sapiens; identical to SEQ ID NO: 12310

SEQ ID NO: 12315 - DNA, 322 bp, Homo sapiens; identical to SEQ ID NO: 12310

SEQ ID NO: 12316 - DNA, 322 bp, Homo sapiens; identical to SEQ ID NO: 12310

SEQ ID NO: 12317 - DNA, 322 bp, Homo sapiens; identical to SEQ ID NO: 12310

SEQ ID NO: 12318 - DNA, 322 bp, Homo sapiens
gccatccggatgacccagtctccatcctcattctctgcatctacaggagacagagtcatcatcacttgtcgggcgagtcagggtattagcagttatttagcctggtatcagcaaaaaccagggaaagcccctaagctcctgatctatgctgcatccactttgcaaagtggggtcccatctaggttcagcggcagtggatctgggacagatttcactctcaccatcagctgcctgcagtctgaagattttgcaacttattactgtcaacagtattatagttaccctcggaccttcggccaagggacacgactggagattaaac

SEQ ID NO: 12319 - DNA, 322 bp, Homo sapiens; identical to SEQ ID NO: 12310

SEQ ID NO: 12320 - DNA, 322 bp, Homo sapiens; identical to SEQ ID NO: 12310

SEQ ID NO: 12321 - DNA, 322 bp, Homo sapiens; identical to SEQ ID NO: 12310

SEQ ID NO: 12322 - DNA, 322 bp, Homo sapiens; identical to SEQ ID NO: 12310

SEQ ID NO: 12323 - DNA, 322 bp, Homo sapiens; identical to SEQ ID NO: 12310

SEQ ID NO: 12324 - DNA, 322 bp, Homo sapiens; identical to SEQ ID NO: 12310

SEQ ID NO: 12325 - DNA, 322 bp, Homo sapiens
gccatccggatgacccagtctccatcctcattctctgcatctacaggagacagagtcaccatcacttgtcgggcgagtcagggtattagcagttatttagcctggtatcagcaaaaaccagggaaagcccctaagctcctgatctatgctgcatccactttgcaaagtggggtcccatctaggttcagcggcagtggatctgggacagatttcactctcaccatcagctgcctgcagtctgaagattttgcagcttattactgtcaacagtattatagttaccctcggaccttcggccaagggacacgactggagattaaac

SEQ ID NO: 12326 - DNA, 322 bp, Homo sapiens
gccatccggatgacccagtctccatcctcattctctgcatctacaggagacagagtcaccatcacttgtcgggcgagtcagggtattagcagttatttagcctggtatcagcaaaaaccagggaaagcccctaacctcctgatctatgctgcatccactttgcagagtggggtcccatctaggttcagcggcagtggatctgggacagatttcactctcaccatcagctgcctgcagtctgaagattttgcaacttattactgtcaacagtattatagttaccctcggaccttcggccaagggacacgactggagattaaac

SEQ ID NO: 12327 - DNA, 322 bp, Homo sapiens; identical to SEQ ID NO: 12310

SEQ ID NO: 12328 - DNA, 322 bp, Homo sapiens; identical to SEQ ID NO: 12310

SEQ ID NO: 12329 - DNA, 322 bp, Homo sapiens; identical to SEQ ID NO: 12310

SEQ ID NO: 12330 - DNA, 322 bp, Homo sapiens; identical to SEQ ID NO: 12310

SEQ ID NO: 12331 - DNA, 322 bp, Homo sapiens; identical to SEQ ID NO: 12310

SEQ ID NO: 12332 - DNA, 322 bp, Homo sapiens; identical to SEQ ID NO: 12310

SEQ ID NO: 12333 - DNA, 322 bp, Homo sapiens
gccatccggatgacccagtctccatcctcattctctgcatctacaggagacagagtcaccatcacttgtcgggcgagtcagggtattagcagttatttagcctggtatcagcaaaaaccagggaaagcccctaagctcctgatctctgctgcatccactttgcaaagtggggtcccatctaggttcagcggcagtggatctgggacagatttcactctcaccatcagctgcctgcagtctgaagattttgcaacttattactgtcaacagtattttagttaccctcggaccttcggccaagggacacgactggagattaaac

SEQ ID NO: 12334 - DNA, 322 bp, Homo sapiens; identical to SEQ ID NO: 12310

SEQ ID NO: 12335 - DNA, 322 bp, Homo sapiens; identical to SEQ ID NO: 12310

SEQ ID NO: 12336 - DNA, 322 bp, Homo sapiens; identical to SEQ ID NO: 12310

SEQ ID NO: 12337 - DNA, 322 bp, Homo sapiens
gccatccggatgacccagtctccatcctcattctctgcatctacaggagacagagtcaccatcacttgtcgggcgagtcagggtattagcagttatttaacctggtatcagcaaaaaccagggaaagcccctaagctcctgatctatgctgcatccactttgcaaagtggggtcccatcaaggttcagcggcagtggatctgggacagatttcactctcaccatcagctgcctgcagtctgaagattttgcaacttattactgtcaacagtattatagttaccctcgaacgttcggccaagggaccaaggtggaaatcaaac

SEQ ID NO: 12338 - DNA, 322 bp, Homo sapiens; identical to SEQ ID NO: 12337

SEQ ID NO: 12339 - DNA, 322 bp, Homo sapiens; identical to SEQ ID NO: 3870

SEQ ID NO: 12340 - DNA, 322 bp, Homo sapiens; identical to SEQ ID NO: 3870

SEQ ID NO: 12341 - DNA, 322 bp, Homo sapiens; identical to SEQ ID NO: 3870

SEQ ID NO: 12342 - DNA, 322 bp, Homo sapiens; identical to SEQ ID NO: 3870

SEQ ID NO: 12343 - DNA, 322 bp, Homo sapiens
gccatccggatgacccagtctccatcctcattctctgcatctacaggagacagagtcaccatcacttgtcgggcgagtcagggtattagcagttatttagcctggtatcagcaaaaaccagggaaagcccctaagctcctgatctatgctgcatccactttgcaaagtggggtcccatcaaggttcagcggcagtggatctgggacagatttcactctcaccatcagctgcctgcagtctgaagattttgcaacttatcactgtcaacagtattatagttaccctcgaacgttcggccaagggaccaaggtggaaatcaaac

SEQ ID NO: 12344 - DNA, 325 bp, Homo sapiens
gccatccggatgacccagtctccatcctcattctctgcatctacaggagacagagtcaccatcacttgtcgggcgagtcagggtattagcagttatttagcctggtatcagcaaaaaccagggaaagcccctaagctcctgatctatgctgcatccactttgcaaagtggggtcccatcaaggttcagcggcagtggatctgggacagatttcactctcaccatcagcagtctgcaacctgaagattttgcaacttactactgtcaacagagttacagtacccctccgtacacttttggccaggggaccaagctggagatcaaac

SEQ ID NO: 12345 - DNA, 322 bp, Homo sapiens
gccatccggatgacccagtctccatcctcattctctgcatctacaggagacagactcaccatcacttgtcgggcgagtcagggtattagcagttatttagcctggtatcagcaaaaaccagggaaagcccctaagctcctgatctatgctgcatccactttgcaaagtggggtcccatcaaggttcagcggcagtggatctgggacagatttcactctcaccatcagctgcctgcagtctgaagattttgcaacttattactgtcaacagtattatagttaccctcgaacgttcggccaagggaccaaggtggaaatcgaac

SEQ ID NO: 12346 - DNA, 331 bp, Homo sapiens
cagtctgccctgactcagcctgcctccgtgtctgggtctcctggacagtcgatcaccatctcctgcactggaaccaacagtgacgttggtgtttataactatgtctcctggtaccaacagcacccaggcaaagcccccaaactcatgatttatgaggtcagtaatcggccctcagggatttctaatcgcttctctggctccaagtctggcaacacggcctccctgaccatctctgggctccaggctgaggacgaggctgattattactgcatctcatatacaagcagcagcactctgatattcggcggagggaccaagctgaccgtcctag

SEQ ID NO: 12347 - DNA, 331 bp, Homo sapiens
cagtctgccctgactcagcctgcctccgtgtctgggtctcctggacagtcgatcaccatctcctgcactggaaccagcagtgacgttggtgtttataactatgtctcctggtaccaacagcacccaggcaaagcccccaaactcatgatttatgaggtcagtaatcggccctcagggatttctaatcgcttctctggctccaagtctggcaacacggcctccctgaccatctctgggctccaggctgaggacgaggctgattattactgcatctcatatacaagcagcagcactctgatattcggcggagggaccaagctgaccgtcctag

SEQ ID NO: 12348 - DNA, 331 bp, Homo sapiens; identical to SEQ ID NO: 12347

SEQ ID NO: 12349 - DNA, 331 bp, Homo sapiens; identical to SEQ ID NO: 12347

SEQ ID NO: 12350 - DNA, 331 bp, Homo sapiens; identical to SEQ ID NO: 12347

SEQ ID NO: 12351 - DNA, 331 bp, Homo sapiens; identical to SEQ ID NO: 12347

SEQ ID NO: 12352 - DNA, 331 bp, Homo sapiens; identical to SEQ ID NO: 12347

SEQ ID NO: 12353 - DNA, 331 bp, Homo sapiens; identical to SEQ ID NO: 12347

SEQ ID NO: 12354 - DNA, 331 bp, Homo sapiens; identical to SEQ ID NO: 12347

SEQ ID NO: 12355 - DNA, 322 bp, Homo sapiens
gtcatctggatgacccagtctccatccttactctctgcgtctacaggagacagagtcaccgtcagttgtcggatgagtcagggcattagcaattgtttagcctggtttcagcaaaaaccagggaaagcccctaagctcctgatctatgctgcatccactttgcaaagtggggtcccatcaaggttcagcggcagtggatcggggacagacttcactctcaccatcagcagcctgcagcctgatgattttgcaacttattactgccaacaatataatagttattcgtggacgttcggccaagggaccaaggtggaaatcaaac

SEQ ID NO: 12356 - DNA, 322 bp, Homo sapiens
gacatccagatgacccagtctccttccaccctgtctgcatctgtaggagacagagtcaccatcacttgccgggccagtcagagtattagtcgctggttggcctggtatcagcagaaaccagggaaagcccctaagctcctgatctataaggcgtctagtttagaaagtggggtcccatcaaggttcagcggcagtggatcggggacagacttcactctcaccatcagcagcctgcagcctgatgattttgcaacttattactgccaacaatataatagttattcgtggacgttcggccaagggaccaaggtggaaatcgaac

SEQ ID NO: 12357 - DNA, 322 bp, Homo sapiens; identical to SEQ ID NO: 12355

SEQ ID NO: 12358 - DNA, 317 bp, Homo sapiens
gacatccagatgacccagtctccttccaccctgtctgcatctgtaggagacagagtcaccatcacttgccgggccagtcagagtattagtcgctggttggcctggtatcagcagaaaccagggaaagcccctaagctcctgatctataaggcgtctagtttagaaagtggggtcccatcaaggttcagcggcagtggatctgggacagatttcactctcaccatcagttgcctgcagtctgaagattttgcaacttattactgtcaacagtattatactttcctcttttggccagggggccaagctggagatcaaac

SEQ ID NO: 12359 - DNA, 317 bp, Homo sapiens
gtcatctggatgacccagtctccatccttactctctgcgtctacaggagacagagtcaccgtcagttgtcggatgagtcagggcattagcaattgtttagcctggtttcagcaaaaaccagggaaagcccctaagctcctgatctatgctgcatccactttgcaaagtggggtcccatcaaggttcagtggcagtggatctgggacagatttcactctcaccatcagttgcctgcagtctgaagattttgcaacttattactgtcaacagtattatactttcctcttttggccagggggccaagctggagatcaaac

SEQ ID NO: 12360 - DNA, 322 bp, Homo sapiens
gtcatctggatgacccagtctccatccttactctctgcgtctacaggagacagagtcaccgtcagttgtcggatgagtcagggcattagcaattgtttagcctggtttcagcaaaaaccagggaaagcccctaagctcctgatctatgctgcatccactttgcaaagtggggtcccatcaaggttcagtggcagtggatctgggacagatttcactctcaccatcagcagcctgcagcctgatgattttgcaacttattactgccaacagtataatagttattctcggacttttggccaggggaccaagctggagatcaaac

SEQ ID NO: 12361 - DNA, 322 bp, Homo sapiens
gacatccagatgacccagtctccttccaccctgtctgcatctgtaggagacagagtcaccatcacttgccgggccagtcagagtattagtcgctggttggcctggtatcagcagaaaccagggaaagcccctaagctcctgatctatgctgcatccactttgcaaagtggggtcccatcaaggttcagcggcagtggatcggggacagacttcactctcaccatcagcagcctgcagcctgatgattttgcaacttattactgccaacaatataatagttattcgtggacgttcggccaagggaccaaggtggaaatcgaac

SEQ ID NO: 12362 - DNA, 317 bp, Homo sapiens; identical to SEQ ID NO: 12358

SEQ ID NO: 12363 - DNA, 331 bp, Homo sapiens
cagtctgccctgactcagcctcgctcagtgtccgggtctcctggacagtcagtcaccatctcctgcactggaaccagcagtgatgttggtggttataaccatgtctcctggtaccaacagcacccaggcaaagcccccaaactcatgatttatgatgtcagtgagcggccctcaggggtccctgatcgcttctctggctccaagtctggcaacacggcctccctgaccatctctgggctccaggctgaggatgaggctgattattactgctgctcatatgcagacccctacactttgatattcggcggagggaccaagctgaccgtcctag

SEQ ID NO: 12364 - DNA, 331 bp, Homo sapiens; identical to SEQ ID NO: 12363

SEQ ID NO: 12365 - DNA, 331 bp, Homo sapiens; identical to SEQ ID NO: 12363

SEQ ID NO: 12366 - DNA, 331 bp, Homo sapiens
cagtctgccctgactcagcctcgctcagtgtccgggtctcctggacagtcagtcaccatctcctgcactggaaccatcagtgatgttggtggttataaccatgtctcctggtaccaacagcacccaggcaaagcccccaaactcatgatttatgatgtcagtgagcggccctcaggggtccctgatcgcttctctggctccaagtctggcaacacggcctccctgaccatctctgggctccaggctgaggatgaggctgattattactgctgctcatatgcagacccctacactttgatattcggcggagggaccaagctgaccgtcctag

SEQ ID NO: 12367 - DNA, 331 bp, Homo sapiens; identical to SEQ ID NO: 12363

SEQ ID NO: 12368 - DNA, 331 bp, Homo sapiens; identical to SEQ ID NO: 12363

SEQ ID NO: 12369 - DNA, 331 bp, Homo sapiens; identical to SEQ ID NO: 12363

SEQ ID NO: 12370 - DNA, 332 bp, Homo sapiens
cagtctgtgctgacgcagccgccctcagtgtctggggccccagggcagagggtcaccatctcctgcactgggagcagctccatcatcggggcaagttctgttgtacactggtaccagcagcttccaggaacagcccccaaactcctcatctatggtaacaacaatcgaccctcaggggtccctgaccgattctctggctccaagtctggcacctcagcctccctggccatcactgggctccaggctgaggatgaggctgattattactgccagtcctatgacagcagcctgagtggtgtggttttcggcggagggaccaagctcaccgtcct

SEQ ID NO: 12371 - DNA, 334 bp, Homo sapiens
cagtctgtgctgacgcagccgccctcagtgtctggggccccagggcagagggtcaccatctcctgcactgggagcagctccatcatcggggcaggttatgttgtacactggtaccagcagcttccaggaacagcccccaaactcctcatctatggtaacaacaatcggccctcaggggtccctgaccgattctctggctccaagtctggcacctcagcctccctggccatcactgggctccaggctgaggatgaggctgattattactgccagtcctatgacagcagcctgagtggtgtggtattcggcggagggaccaagctgaccgtcctag

SEQ ID NO: 12372 - DNA, 334 bp, Homo sapiens
cagtctgtgctgacgcagccgccctcagtgtctggggccccagggcagagggtcaccatctcctgcactgggagcagctccatcatcggggcaggttatgttgtccactggtaccagcagcttccaggaacagcccccaaactcctcatctatggtaacaacaatcggccctcaggggtccctgaccgattctctggctccaagtctggcacctcagcctccctggccatcactgggctccaggctgaggatgaggctgattattactgccagtcctatgacagcagcctgagtggtgtgctattcggcggagggaccaagctgaccgtcctag

SEQ ID NO: 12373 - DNA, 334 bp, Homo sapiens
cagtctgtgctgacgcagccgccctcagtgtctggggccccagggcagagggtcaccatctcctgcactgggagcagctccatcatcggggcaggttatgttgttcactggtaccagcagcttccaggaacagcccccaaactcctcatctatggtaacaacaatcggccctcaggggtccctgaccgattctctggctccaagtctggcacctcagcctccctggccatcactgggctccaggctgaggatgaggctgattattactgccagtcccatgacagcagcctgagtggtgtggtattcggcggagggaccaagctgaccgtcctag

SEQ ID NO: 12374 - DNA, 334 bp, Homo sapiens; identical to SEQ ID NO: 12371

SEQ ID NO: 12375 - DNA, 334 bp, Homo sapiens; identical to SEQ ID NO: 12371

SEQ ID NO: 12376 - DNA, 332 bp, Homo sapiens; identical to SEQ ID NO: 12370

SEQ ID NO: 12377 - DNA, 331 bp, Homo sapiens
cagtctgccctgactcagcctgcctccgtgtctgggtctcctggacagtcgatcaccatctcctgcactggaaccagcagtgacgttggtggttataactatgtctcctggtaccaacaacacccaggcaaagcccccaaactcatgatttatgatgtcagtaatcggccctcaggggttcctaatcgcttctctggctccaagtctggcaacacggcctccctgaccatctctgggctccaggctgaggacgagggtgattattactgcagctcatatagaagcgacagcactgtggtcttcggcggggggaccaagctgaccgtcctag

SEQ ID NO: 12378 - DNA, 322 bp, Homo sapiens
gccatccggatgacccaatctccatcctcattctctgcatctacaggagacagagtcaccatcacttgtcgggcgagtcagggtattagcagttatttagcctggtatcagcaaaaaccagggacagcccctaagctcctgatctatgctgcatccactttgcaaagtggggtcccatcaaggttcagcggcagtggatctgggacagatttcactctcaccatcagctgcctgcagtctgaagattttgcaacttattactgtcaacagtattatagttaccctcggacttttggccaggggaccaagctggacatcaaac

SEQ ID NO: 12379 - DNA, 322 bp, Homo sapiens
gccatccggatgacccaatctccatcctcattctctgcatctacaggagacagagtcaccatcacttgtcgggcgagtcagggtattagcagttatttagcctggtatcagcaaaaaccagggacagcccctaagctcctgatctatgctgcatccactttgcaaagtggggtcccatcaaggttcagcggcagtggatctgggacagatttcactctcaccatcagctgcctgcagtctgaagattttgcaacttattactgtcaacaatattatagttacccgtggacgttcggccaagggaccaaggtggaaatcaaac

SEQ ID NO: 12380 - DNA, 322 bp, Homo sapiens
gccatccggatgacccaatctccatcctcattctctgcatctacaggagacagagtcaccatcacttgtcgggcgagtcagggtattagcagttatttagcctggtatcagcaaaaaccaggaacagcccctaagctcctgatctatgctgcatccactttgcaaagtggggtcccatcaaggttcagcggcagtggatctgggacagatttcactctcaccatcagctgcctgcagtctgaagattttgcaacttattactgtcaacagtattatagttaccctcggacttttggccaggggaccaagctggacatcaaac

SEQ ID NO: 12381 - DNA, 322 bp, Homo sapiens
gccatccggatgacccaatctccatcctcattctctgcatctacaggagacagagtcaccatcacttgtcgggcgagtcagggtattagcagttatttagcctggtatcagcaaaaaccagggacagcccctaagctcctgatctatgctgcatccactttgcaaagtgaggtcccatcaaggttcagcggcagtggatctgggacagatttcactctcaccatcagctgcctgcagtctgaagattttgcaacttattactgtcaacagtattatagttaccctcggacttttggccaggggaccaagctggacatcaaac

SEQ ID NO: 12382 - DNA, 322 bp, Homo sapiens; identical to SEQ ID NO: 12378

SEQ ID NO: 12383 - DNA, 331 bp, Homo sapiens
cagtctgccctgactcagcctgcctccgtgtctgggtctcctggacagtcgatcaccatctcctgcactggaaccagcagtgacgttggtgcttataactatgtctcctggtaccagcagcaccccggcaaagcccccaaactcataatttgtgaagtcaataagcggccctcaggggtttctaatcgcttctctggctccaagtctggcaacacggcctccctgaccatctctgggctccaggctgaggacgaagctgattattattgcagttcatatacaagtatcaacactctcgtattcggcggagggaccaagctgaccgtcctag

SEQ ID NO: 12384 - DNA, 331 bp, Homo sapiens; identical to SEQ ID NO: 12383

SEQ ID NO: 12385 - DNA, 331 bp, Homo sapiens
cagtctgccctgactcagcctgcctccgtgtctgggtctcctggacagtcgatcaccatctcctgcactggaaccagcagtgacgttggtgcttataactatgtctcctggtaccaacagcaccccggcaaagcccccaaactcataatttgtgaagtcaataagcggccctcaggggtttctaatcgcttctctggctccaagtctggcaacacggcctccctgaccatctctgggctccagtctgaggacgaagctgattattattgcagttcatatacaagtactaacactctcgtattcggcggagggaccaagctgaccgtcctag

SEQ ID NO: 12386 - DNA, 331 bp, Homo sapiens; identical to SEQ ID NO: 12383

SEQ ID NO: 12387 - DNA, 334 bp, Homo sapiens
cagtctgccctgactcagcctgcctccgtgtctgggtctcctggacagtcgatcaccatctcctgcactggaaccagcagtgacgttggtgcttataactatgtctcctggtaccaacagcaccccggcaaagcccccaaactcataatttgtgaagtcaataagcggccctcaggggtttctaatcgcttctctggctccaagtctggcaacacggcctccctgaccatctctgggctccaggctgaggacgaggctgattattactgcagctcatatacaagcagcagcaccccctgggtgttcggcggagggaccaagctgaccgtcctag

SEQ ID NO: 12388 - DNA, 322 bp, Homo sapiens
gccatccggatgacccagtctccatcctcattctctgcatctacaggagacagagtcaccatctcttgtcgggcgagtcagggtattagcagttatttagcctggtatcagcaaaaaccagggaaagcccctaagctcctgatctatgctgcatccactttgcaaagtggggtcccatcaaggttcagcggcagtggatctgggacagatttcactctcaccatcagctgcctgcagtctgaagattttgcaacttattactgtcaacagtactatagttaccctcggacgttcggccaagggaccaaggtggaaatcaaac

SEQ ID NO: 12389 - DNA, 322 bp, Homo sapiens; identical to SEQ ID NO: 837

SEQ ID NO: 12390 - DNA, 322 bp, Homo sapiens
gccatccggatgacccagtctccatcctcgttctctgcatctacaggagacagagtcaccatcacttgtcgggcgagtcagggtattagcagttatttagcctggtatcagcaaaaaccagggaaagcccctaagctcctgatctatgctgcatccactttgcaaagtggtgtcccatcaaggttcagcggcagtggatctgggacagatttcactctcaccatcagctgcctgcagtctgaagattttgcaacttattactgtcaacagtattataattaccctcggacgttcggccaagggaccaaggtggaaatcaaac

SEQ ID NO: 12391 - DNA, 322 bp, Homo sapiens
gccatccggatgacccagtctccatcctcattctctgcatctacaggagacagagtcaccatctcttgtcgggcgagtcagggtattagcagttatttagcctggtatcagcaaaaaccagggaaagcccctaagctcctgatctatgctgcatccactttgcaaagtggggtcccatcaaggttcagcggcagtggatctgggacagatttcactctcaccatcagttgcctgcagtctgaagattttgcaacttattactgtcaacagtattatagttaccctcggacgttcggccaagggaccaaggtggaaatcaaac

SEQ ID NO: 12392 - DNA, 322 bp, Homo sapiens
gccatccggatgacccagtctccatcctcattctctgcatctacaggagacagagtcaccatcacttgtcgggcgagtcagggtattagcagttatttagcctggtatcagcaaaaaccagggaaagcccctatactcctgatctatgctgcatccactttgcaaagtggggtcccatcaaggttcagcggcagtggatctgggacagatttcactctcaccatcagctgcctgcagtctgaagattttgcaacttattactgtcaacagtattatagttaccctcggacgttcggccaagggaccaaggtggaaatcaaac

SEQ ID NO: 12393 - DNA, 334 bp, Homo sapiens
cagtctgtgctgacgcagccgccctcagtgtctggggccccagggcagagggtcaccatctcctgcactgggagcagctccatcatcggggcaggttatgttgttcactggtaccagcagcttccaggaacagcccccaaactcctcatctatggtaacaacaatcggccctcaggggtccctgaccgattctctggctccaagtctggcacctcagcctccctggccatcactgggctccaggctgaggatgaggctgattattactgccagtcccatgacagcagcctgagtggtgtggtattcggcggagggaccaagctcaccgtcctag

SEQ ID NO: 12394 - DNA, 317 bp, Homo sapiens
gctgacacagccaccctcggtgtcagtgtccccaggacaaacggccaggatcacctgctctggagatgcattgccaaaaagatatgcttattggtaccagcagaagtcaggccaggcccctgtgctggtcatctatgacgacaacaaacgaccctccgggatccctgagagattctctggctccagctcagggacaatggccaccttgactatcaatggggcccaggtggaggatgaagctgactactactgttactcaacagacagcagtgctaatcatagggtcttcggcggagggaccaagctgaccgtcctag

SEQ ID NO: 12395 - DNA, 334 bp, Homo sapiens; identical to SEQ ID NO: 12393

SEQ ID NO: 12396 - DNA, 334 bp, Homo sapiens; identical to SEQ ID NO: 12393

SEQ ID NO: 12397 - DNA, 325 bp, Homo sapiens
tcctatgagctgacacagccaccctcggtgtcagtgtccccaggacaaacggccaggatcacctgctctggagatgcattgccgaaaagatatgcttattggtaccagcagaagtcaggccaggcccctgtgctggtcatctatgacgacaacaaacgaccctccgggatccctgagagattctctggctccagctcagggacaatggccaccttgactatcaatggggcccaggtggaggatgaagctgactactactgttactcaacagacagcaatgctaatcatagggtattcggcggagggaccaagctgaccgtcctag

SEQ ID NO: 12398 - DNA, 322 bp, Homo sapiens
gacatccagatgacccagtctccatcctccctgtctgcatctataggagacagagtcaccatcacttgccgggcaagtcagaacattaacaactatttaaattggtggcagcagaaaccagggaaagcccctaagctcctgatctatgctgcctcgagtttgcaaagtggggtcccatcaaggttcagtggcagtggatctgggacagacttcaatctcaccatcagcagtctgcaacctgaagattttgcaacttactactgtcaacagagttacagtaccccatacacttttggccaggggaccaagctagagatcaaac

SEQ ID NO: 12399 - DNA, 322 bp, Homo sapiens; identical to SEQ ID NO: 12398

SEQ ID NO: 12400 - DNA, 322 bp, Homo sapiens; identical to SEQ ID NO: 12398

SEQ ID NO: 12401 - DNA, 322 bp, Homo sapiens
gacatccagatgacccagtctccatcctccctgtctgcatctataggagacagagtcaccatcacttgccgggcaagtcagaacattaacaactatttaaattggtggcagcagaaaccagggaaagcccctaagctcctgatctatgctgcctcgagtttgcaaagtggggtcccatcaaggttcagtggcagtggatctgggacagacttcaatctcaccatcagcagtctgcaacctgaagattttgcaacttactactgtcaacagagttacactaccccgtggacgttcggccaagggaccaaggtggaaatcaaac

SEQ ID NO: 12402 - DNA, 322 bp, Homo sapiens; identical to SEQ ID NO: 12401

SEQ ID NO: 12403 - DNA, 328 bp, Homo sapiens
caggctgtggtgactcaggagccctcactgactgtgtccccaggagggacagtcactctcacctgcggctccagcactggagctgtcaccagtggtcattatccctactggttccagcagaagcctggccaagcccccacgacactgatttatgttacaagcaacaaacactcctggacccctgcccggttctcaggctccctccttgggggcaaagctgccctgaccctctcgggtgcgcagcctgaggatgaggctgagtattactgcctgctctcctatagtggtgcttgggtgttcggcggagggaccaagctgaccgtcctag

SEQ ID NO: 12404 - DNA, 331 bp, Homo sapiens
cagtctgccctgactcagcctgcctccgtgtctgggtctcctggacagtcgatcaccatctcctgcactggaaccagcagtgacgttggtggttatgactatgtctcctggtatcaacaacacccaggcaaagcccccaaactcatgatttatgaggtcagtaatcggccctcaggggtttctaatcgcttctctggctccaagtctggcaacacggcctccctgaccatctctgggctccaggctgaggacgaggctgattatcactgcagctcatatgcaagcggcagcactgtgcttttcggcggagggaccaagctgaccgtcctag

SEQ ID NO: 12405 - DNA, 319 bp, Homo sapiens; identical to SEQ ID NO: 1658

SEQ ID NO: 12406 - DNA, 337 bp, Homo sapiens
gatgttgtgatgactcagtctccactctccctgcccgtcacccttggacagccggcctccatgtcctgcaggtctggtcaaagcctcgtacacagtgatggaaacacctacttgaattggtttcagcagaggccaggccagtctccaaggcgcctaatttataaggtttctaaccgggactctggggtcccagacagattcagcggcagtgggtcaggcactgatttcacactgaaaatcagcagggtggaggctgaggatgttggggtttattactgcatgcaaggtacacactggccgtggacgctcggccaagggaccaaggtggaaatcaaac

SEQ ID NO: 12407 - DNA, 331 bp, Homo sapiens
cagtctgtgttgacgcagccgccctcagtgtctgcggcccctggacagaaggtcaccatctcctgctctggaaccagctccaacattgggaataatggtgtatcctggtaccagcaggtcccgggaacagcccccaaactcctcatctatgacgataataaacgaccctcagggattcctgaccggttctctggctccaagtctggctcgtcagccaccctgggcatcaccgggctccagactggggacgaggccgattattactgcggaacatgggataccagcctgacttctggagtgttcggtggagggaccaagctgaccgtcctag

SEQ ID NO: 12408 - DNA, 331 bp, Homo sapiens
cagtctgccctgactcagcctccctccgcgtccgggtctcctggacagtcagtcaccatctcctgcactggaaccagcagtgacgttggtacttataactatgtctcctggtaccaacagcacccaggcaaagcccccaaactcatgacttatgaggtcagtaagcggccctcaggggtccctgatcgcttctttggctccaagtctggcaacacggcctccctgaccgtctctgggctccaggctgaggatgaggctgattattactgcagctcatatgcaggcagcaacaatttggtattcggcggagggaccaagctgaccgtcctag

SEQ ID NO: 12409 - DNA, 331 bp, Homo sapiens; identical to SEQ ID NO: 12408

SEQ ID NO: 12410 - DNA, 331 bp, Homo sapiens; identical to SEQ ID NO: 12408

SEQ ID NO: 12411 - DNA, 331 bp, Homo sapiens; identical to SEQ ID NO: 12408

SEQ ID NO: 12412 - DNA, 330 bp, Homo sapiens
cagtctgccctgactcagcctgcctccgtgtctgcgtctcctggacagtcgatcaccatctcctgcactggaaccagcagtgacgttggtggttatgactatgtctcctggtaccaacagcacccaggcaaagcccccaaactcatgatttatgaggtcaataatcggccctcaggggtttctaatcgcttctctggctccaagtctggcaacacggcctccctgaccatctctgggctccaggctgaggacgaggctgattatcactgcagctcatatgcaagcaacagcgctgtgcttttcggcggagggaccaagctgaccgtccta

SEQ ID NO: 12413 - DNA, 331 bp, Homo sapiens
cagtctgccctgactcagcctgcctccgtgtctgggtctcctggacagtcgatcaccatctcctgcactggaaccagcagtgacgttggtggttatgactatgtctcctggtaccaacaacacccaggcaaagcccccaaactcatgatttatgaggtcagtaatcggccctcaggggtttctaatcgcttctctggctccaagtctggcaacacggcctccctgaccatctctgggctccaggctgacgacgaggctgattatcactgcagctcatatgcaagtggcagcactgtgcttttcggcggagggaccaagctgaccgtcctag

SEQ ID NO: 12414 - DNA, 331 bp, Homo sapiens
cagtctgccctgactcagcctgcctccgtgtctgggtctcctggacagtcgatcaccatctcctgcactggaaccagcagtgacgttggtggttatgactatgtctcctggtaccaacagcacccaggcaaagcccccaaactcatgatttatgaggtcagtaatcggccctcaggggtttctaatcgcttctctggctccaagtctggcaacacggcctccctgaccatctctgggctccaggctgacgacgaggctgattatcactgcagctcatatgcaagtggcagcactgtgcttttcggcggagggaccaagctgaccgtcctag

SEQ ID NO: 12415 - DNA, 331 bp, Homo sapiens; identical to SEQ ID NO: 12414

SEQ ID NO: 12416 - DNA, 337 bp, Homo sapiens
gatattgtgatgactcagtctccactctccctgcccgtcacccctggagagccggcctccatctcctgcaggtctagtcagagcctcctgcatagtaatggatactactatttggattggtacctgcagaaaccagggcagtctccacagctcttgatctatttgggttctaatcgggcctccggggtccctgacaggttcagtggcagtggatcaggcacagattttacactgaaaatcagcagagtggaggctgaggatgttggggtttattactgcatgcaacctctacaaactcctcagactttcggcggagggaccaaggtggagatcaaac

SEQ ID NO: 12417 - DNA, 337 bp, Homo sapiens
gatattgtgatgactcagtctccactctccctgcccgtcacccctggagagccggcctccatctcctgcaggtctagtcagagcctcctgcatagtaatggatactactatttggattggtacctgcagaagccagggcagtctccacagctcttgatctatttgggttctaatcgggcctccggggtccctgacaggttcagtggcagtggatcaggcacagattttacactgaaaatcagcagagtggaggctgaggatgttggggtttattactgcatgcaacctctacaaactcctcagactttcggcggagggaccaaggtggagatcaaac

SEQ ID NO: 12418 - DNA, 337 bp, Homo sapiens
gatattgttatgactcagtctccactctccctgcccgtcacccctggagagccggcctccatctcctgcaggtctagtcagagcctcctgcgtagtaatggatactactatttggattggtacctgcagaaaccagggcagtctccacaactcttgatctatttgggttcttatcgggcctccggggtccctgacaggttcagtggcagtggatcaggcacagattttacactgaaaatcagcagagtggaggctgaggatgttgggatttattactgcatgcaacctctacaaactcctcagactttcggcggagggaccaaggtggagatcaaac

SEQ ID NO: 12419 - DNA, 337 bp, Homo sapiens
gatattgtgatgactcagtctccactctccctgcccgtcacccctggagagccggcctccatctcctgcaggtctagtcagagcctcctgcagagtaatggatactactatttggattggtaccagcagaaaccagggcagtctccacagctcttgatctatttgggttctaatcgggcctccggggtccctgacaggttcagtggcagtggatcaggcacagattttacactgaaaatcagcagagtggaggctgaggatgttggggtttattactgcatgcaacctctacaaactcctcagactttcggcggagggaccaaggtggagatcaaac

SEQ ID NO: 12420 - DNA, 319 bp, Homo sapiens
tcctatgagctgactcagccaccctcagtgtccgtgtccccagggcagacagccagcatcacctgctccggacaaaaattgggggataaatatgctttctggtatcagcagaagccaggccagtcccctgtcctggtcatctctcaagatggcacgcggccctcagggatccctgagcgattctctggctccaactctgggaacacagccactctgaccatcagcgggacccaggctatggatgaggctgactattactgtcaggcgtgggacaccagcactgtggtattcggcggagggaccaagctgaccgtcctag

SEQ ID NO: 12421 - DNA, 319 bp, Homo sapiens; identical to SEQ ID NO: 12420

SEQ ID NO: 12422 - DNA, 319 bp, Homo sapiens; identical to SEQ ID NO: 12420

SEQ ID NO: 12423 - DNA, 331 bp, Homo sapiens; identical to SEQ ID NO: 9439

SEQ ID NO: 12424 - DNA, 331 bp, Homo sapiens; identical to SEQ ID NO: 9439

SEQ ID NO: 12425 - DNA, 331 bp, Homo sapiens; identical to SEQ ID NO: 9439

SEQ ID NO: 12426 - DNA, 319 bp, Homo sapiens
gacatccagttgacccagtctccatcctccctgtctgcatctgtaggagacagagtcaccatcacttgccgggtgagtcagggcatgagtagttatttaaattggtttcggcagaaaccagggaaagttcctaagctcctgatctatagtgcttccaatttgcaatctggagtcccgtctcggttcagtggcagtggcatctggaacagattcacactcactatcagcagcctgcagcctgaagatgttgcaacttattacggccaacggacttacaatgtcccttatttcggcggagggaccaaggtggagatcaaac

SEQ ID NO: 12427 - DNA, 319 bp, Homo sapiens
tcctttgacctgactcagccaccctcagtgtccgtgtccccaggacagacagccagcatcacctgctctggagataacttggggaataagtatgtttgctggtatcaacagaagccaggccagtcccctgtactggtcatgtatcaagataacaagcggccctcagggatccctgagcgattctctggctccaactctggaaacacagccactcttaccatcagtgggacccaggctatggatgaggctgactattactgtcaggcgtgggacagcagaactgtggtgttcggcggagggaccaagctgaccgtcctag

SEQ ID NO: 12428 - DNA, 318 bp, Homo sapiens
gacatccagttgacccagtctccatcctccctgtctgcatctgtaagagacagagtcaccatcacttgccgggtgagtcagggcattagtagttatttaaattggtttcggcagaaaccagggaaagttcctaagctcctgatctatagtgcttccaatttgcaatctggagtcccgtcccggttcagtggcagtggatctggaacagattcacactcactatcagcagcctgcagcctgaagatgttgcaacttattacggccaacggacttacaatgtcccttatttcggcggagggaccaaggtggagatcaaac

SEQ ID NO: 12429 - DNA, 331 bp, Homo sapiens
cagtctgccctgactcagcctgcctccgtgtctgggtctcctggacagtcgatcaccatctcctgcactggaaccagcagtgatgttgggagttataactttgtctcctggtaccaacaacacccaggcaaagcccccaaactcatgatttatgaggtcagtaagcggccctcaggggtttctaatcgcttctctggctccaagtctggcaacacggcctccctgacaatctctgggctccaggctgaggacgagggtgactattactgctgctcatatgcagtcggtagcacccgggtgttcggcggagggaccacgttgaccgtcctag

SEQ ID NO: 12430 - DNA, 331 bp, Homo sapiens; identical to SEQ ID NO: 12429

SEQ ID NO: 12431 - DNA, 331 bp, Homo sapiens
cagtctgccctgactcagcctgcctccgtgtctgggtctcctggacagtcgatcaccatctcctgcactggaaccagcggtgatgttgggagttataactttgtctcctggtaccaacaacacccaggcaaagcccccaaactgacgatttatgaggtcagtaagcggccctcaggggtttctaatcgcttctctggctccaagtctggcaacacggcctccctgacaatctctgggctccaggctgaggacgagggtgactattactgctgctcatatgcagtcggtagcgcccgggtgttcggcggagggaccacgttgaccgtcctag

SEQ ID NO: 12432 - DNA, 321 bp, Homo sapiens
gacatccagatgacccagtctccttccaccctgtctgcatctataggagacagagtcaccctcacttggcgggccagtcagcgtattagtagctggttggcctggtgtcagtagaaaccagggaaagcccctaacctcctgatctataaggcgtctaatttagagagtggggtcccatcaaggttcagcggcagtggatctgtgacagaaatcacgctcaccatcagcagcctgcagcctgatgattttgcaacttactactgccaacagtatagtagttattaaggacgttcggccaagggaccaaggtggagatcaaac

SEQ ID NO: 12433 - DNA, 343 bp, Homo sapiens
gacatcgtgatgacccagtctccagactccctggctgtgtctctgggcgagagggccaccatcaactgcaagtccagccagagtgttttatacaactccaacaataagaactacttagcttggtaccagcagaaaccaggacagcctcctaagctgctcatttactgggcatctacccgggaatccggggtccctgaccgattcagtggcagcgggtctgggacagatttcactctcaccatcagcagcctgcaggctgaagatgtggcagtttattactgtcagcaatattatagtaatcccctgtacacttttggccaggggaccaagctggagatcaaac

SEQ ID NO: 12434 - DNA, 343 bp, Homo sapiens; identical to SEQ ID NO: 12433

SEQ ID NO: 12435 - DNA, 340 bp, Homo sapiens
gacatcgtgatgacccagtctccagactccctggctgtgtctctgggcgagagggccaccatcaactgcaagtccagccagagtgttttatacagctccaacaataagaactacttagcttggtaccagcagaaaccaggacagcctcctaagctgctcatttactgggcatctacccgggaatccggggtccctgaccgattcagtggcagcgggtctgggacagatttcactctcaccatcagcagcctgcaggctgaagatgtggcagtttattactgtcagcaatattatagtaccccgtggacgttcggccaagggaccaaggtggaaatcaaac

SEQ ID NO: 12436 - DNA, 325 bp, Homo sapiens
gaaatagtgatgacgcagtctccagccaccctgtctgtgtctccaggggaaagagccaccctctcctgcagggccagtcagagtgttagcagcaacttagcctggtaccagcagaaacctggccaggctcccaggctcctcatctatggtgcatccaccagggccactggtatcccagccaggttcagtggcagtgggtctgggacagagttcactctcaccatcagcagcctgcagtctgaagattttgcagtttattactgtcagcactataataactggcctccgtacacttttggccaggggaccaagctggagatcaaac

SEQ ID NO: 12437 - DNA, 322 bp, Homo sapiens
gacatccagatgacccagtctccatcctccctgtctgcatctgtaggagacagagtcaccatcacttgccgggcaagtcagagcattagcaactatttaaattggtatcagcagaatccagggaaagcccctaaggtcctgatcaatgctgctttcagtttgcaaagtggggtcccagcaaggttcagtggcagtggatctgggacagatttcactctcaccatcagcagtctgcagcctgaagattttgcaacttactactgtcaacagagttacagtaccccgtggacgttcggccaagggaccaaggtggaaatcaaac

SEQ ID NO: 12438 - DNA, 322 bp, Homo sapiens; identical to SEQ ID NO: 12437

SEQ ID NO: 12439 - DNA, 331 bp, Homo sapiens
cagtctgccctgactcagcctccctccgcgtccgggtctcctggacagtcagtcaccatctcctgcactggaaccagcagtgacgttggtggttatgactatgtctcctggtaccaacagcacccaggccaagcccccaaactcatgatttatgaggtcagtaagcggccctcaggggtccctgatcgcttctttggctccaagtctggcaacacggcctccctgaccgtctctgggctccaggctgaggatgaggctgattattactgcgcctcatatgcaggcagcaacaatgtgatcttcggcggtgggaccaagttgaccgtcctag

SEQ ID NO: 12440 - DNA, 331 bp, Homo sapiens; identical to SEQ ID NO: 12363

SEQ ID NO: 12441 - DNA, 334 bp, Homo sapiens
cagtctgccctgactcagcctcgctcagtgtccgggtctcctggacagtcagtcaccatctcctgcactggaaccagcagtgatgttggtgcttataactatgtctcctggtaccaacagcacccaggcaaagcccccaaactcgtgatttatgatgtcagtaagcggccctcaggggtccctgatcgcttctctggctccaagtctggcaacacggcctccctgaccatctctgggctccaggctgaggatgaggctgattattactgctgctcatatgcaggcagctacacttattatgtcttcggaactgggaccaaggtcaccgtcctag

SEQ ID NO: 12442 - DNA, 334 bp, Homo sapiens; identical to SEQ ID NO: 12441

SEQ ID NO: 12443 - DNA, 322 bp, Homo sapiens
gacatccagttgacccagtctccatccttcctgtctgcatctgttggagacagagtcaccatcacttgccgggccagtcagggcattagcagttatttagcctggtatcagcaaaaaccagggaaagcccctaagctcctgatctattctgcatccactttgcaaagtggggtcccatcaaggttcagcggcagtggatctgggacagaattcactctcacaatcagcagcctgcagcctgaagattttgcaacttattactgtcaacagcttaatagttacgggctcactttcggccctgggaccaacgtggatatcaaac

SEQ ID NO: 12444 - DNA, 331 bp, Homo sapiens; identical to SEQ ID NO: 12363

SEQ ID NO: 12445 - DNA, 325 bp, Homo sapiens
gaaattgtgttgacgcagtctccaggcaccctgtctttgtctccaggggaaagagccaccctctcctgcagggccagtcagagtgtaagtagcagctacttagcctggtaccagcagaaacctggccaggctcccaggctcctcatctatggtgcatccagaagggccactggcatcccagacaggttcagtggcagtgggtctgggacagacttcactctcaccatcagcagactggagcctgaagattttgcagtgtattactgtcagcagtatggcagctcacaatacacttttggccaggggaccaagctggagatcaaac

SEQ ID NO: 12446 - DNA, 325 bp, Homo sapiens
gaaattgtgttgacgcagtctccaggcaccctgtctttgtctccaggggaaagagccaccctctcctgcagggccagtcagagtgttagtagcaactacttagactggtaccagcagaaacctggccaggctcccaggctcctcatctttggtgcatccagcagggccactggcatcccagacaggttcagtggcagtgggtctgggacagacttcactctcaccatcagcagactggagcctgaagattttgcagtgtattactgtcagcagtatggtagctcacaatacagttttggccaggggaccaagctggagatcaaac

SEQ ID NO: 12447 - DNA, 331 bp, Homo sapiens
cagtctgccctgactcagcctccctccgcgtccgggtctcctggacagtcagtcaccatctcctgcactggaaccagcagtgacgttggtggttataactttgtctcctggtaccaacagcacccaggcaaagcccccaaactcatgatttatgaggtcagtaagcggccctcaggggtccctgatcgcttctttggctccaagtctggcaacacggcctccctgaccgtctctgggctccaggctgaggatgaggctgattattactgcagctcatatgcaggcaacaacaatttgctattcggcggagggaccaagctgaccgtcctag

SEQ ID NO: 12448 - DNA, 331 bp, Homo sapiens; identical to SEQ ID NO: 12447

SEQ ID NO: 12449 - DNA, 331 bp, Homo sapiens; identical to SEQ ID NO: 12383

SEQ ID NO: 12450 - DNA, 331 bp, Homo sapiens; identical to SEQ ID NO: 12383

SEQ ID NO: 12451 - DNA, 324 bp, Homo sapiens
gaaatagtgatgacgcagtctccagccaccctgtctgtgtctccaggggaaagagccaccctctcctgcagggccagtcagagtgttagcagcaacttagcctggtaccagcagaaacctggccaggctcccaggctcctcatctttggtgcatccgccagggccactggtatcccagccaggttcagtggcagtgggtctgggacagagttcactctcactatcagcagcctgcagtctgaagattttgcagtttattactgtcagcagtataataagtggccttcgctcactttcggcggagggaccagggtggagatcaaa

SEQ ID NO: 12452 - DNA, 324 bp, Homo sapiens; identical to SEQ ID NO: 12451

SEQ ID NO: 12453 - DNA, 325 bp, Homo sapiens
gaaattgtgttgacgcagtctccagacaccctctctttgtctccaggggaaagagccaccctctcctgcagggccagtcagagtgttagcagcagctacttagcctggttccagcagaaacgtggccaggctcccaggcttctcatctatggtgcatccagcagggccactggcatcccagacaggttcagtggcagtgggtctgggacagacttcactctcaccatcagcagactggagcctgaagattttgcagtgtattactgtcagcagtatggtagctcaacttggacgttcggccaagggaccaaggtggaaatcaaac

SEQ ID NO: 12454 - DNA, 325 bp, Homo sapiens; identical to SEQ ID NO: 12453

SEQ ID NO: 12455 - DNA, 330 bp, Homo sapiens
cagtctgccctgactcagcctgcctccgtgtctgggtctcctggacagtcgatcaccatctcctgtactggaaccaacagtgacgttggtggttatgactatgtctcctggtaccaacagtacccaggcaaagcccccaaactcatgatttatgaggtcagtaatcggccctcagggttttctaatcgcttctctggctccaagtctggcaacacggcctccctgaccatctctgggctccaggctgaggacgaggctgattattactgcagttcatatagaagcggcagcactgtggtattcggcggagggaccaagctgaccgtccta

SEQ ID NO: 12456 - DNA, 330 bp, Homo sapiens; identical to SEQ ID NO: 12455

SEQ ID NO: 12457 - DNA, 331 bp, Homo sapiens
cagtctgccctgactcagcctgcctccgtgtctgggtctcctggacagtcgatcaccatctcctgcactggaaccagcagtgatgttgggagttataactttgtctcctggtaccaacaacacccaggcaaagcccccaaactcatgatttatgaggtcagtaagcggccctcaggggtttctaatcgcttctctggctccaagtctggcaacacggcctccctgacaatctctgggctccaggctgaggacgagggtgactattactgctgctcatatgcggtcggtagcacccgggtgttcggcggagggaccacgttgaccgtcctag

SEQ ID NO: 12458 - DNA, 328 bp, Homo sapiens
gaaattgtgttgacgcagtctccaggcaccctgtctttgtctccaggggaaagagccaccctctcctgcagggccagtcagagtgttagcaccaactacttagcctggtaccagcagaaacctggccaggctcccaggctcctcatctatggtgcatccagcagggccactggcatcccagacaggttcagtggcagtgggtctgggacagacttcactctcaccatcagcagtctggagcctgaagattttgcagtgtattactgtcagcaatacggtacctcagctccgctcactttcggcggagggaccaaggtggagttcaaac

SEQ ID NO: 12459 - DNA, 322 bp, Homo sapiens; identical to SEQ ID NO: 10330

SEQ ID NO: 12460 - DNA, 322 bp, Homo sapiens
gaaattgtgttgacgcagtctccaggcaccctgtctttgtctccaggggaaagagccaccctctcctgcagggccagtcagagtgttagcagcagctacttagcctggtaccagcagaaacctggccaggctcccaggctgctcatctatggtgcatccagcagggccactggcatcccagacaggttcagtggcagtgggtctgggacagacttcactctcaccatcagcagactggagcctgaagattttgcagtgtattactgtcagcagtatggtagctcacggacgttcggccaagggaccaaggtggaaatcaaac

SEQ ID NO: 12461 - DNA, 325 bp, Homo sapiens
gacatccagatgacccagtctccatcctccctgtctgcatctgtaggagacagagtcaccatcacttgccaggcgagtcaggacattagcaactatttaaattggtatcagtacaaaccagggaaagcccctaagctcctgatctacgacgcatccaatctggaaacaggggtcccatcaaggttcagtggaagtggatctgggacagattttactttcaccatcagtagcctgcagcctgaagatattgcaacatattactgtcaacagtatgataatctccccctgctcactttcggcggagggaccaaggtggagatcaaac

SEQ ID NO: 12462 - DNA, 339 bp, Homo sapiens
cagtctgccctgattcagcctccctccgtgtccgggtctcctggacagtcagtcaccatctcctgcactggaaccaccagtgatgttgggagttatgactatgtctatgtctcctggtaccgacagcacgcaggcacagtccccaaacccatgatctacaatgtcaatactcggccctcaggagtccctgatcgattctctggctccaagtctggcaatacggcctccatgaccatctctggactccaggctgaggacgaggctgattattagtgctgctcatatacaaccagtgccacttgagggtattcggcggagggaccaagctgaccgtcctag

SEQ ID NO: 12463 - DNA, 319 bp, Homo sapiens; identical to SEQ ID NO: 8092

SEQ ID NO: 12464 - DNA, 320 bp, Homo sapiens
tcctatgagctgactcagccaccctcagtgtccgtgtccccaggacagacagccagcatcacctgctctggagataaattgggggataaatatgcttgctggtatcagcagaagccaggccagtcccctgtgctggtcatctatcaagataccaagcggccctcagggatccctgagcgattctctggctccaactctgggaacacagccactctgaccatcagcgggacccaggctatggatgaggctgactattactgtcaggcgtgggacagcagcaccctttacgtcttcggaactgggaccaaggtcaccgtcct

SEQ ID NO: 12465 - DNA, 322 bp, Homo sapiens
gccatccggatgacccagtctccatcctcattctctgcatctacaggagacagagtcaccatcacttgtcgggcgagtcagggtattagcagttatttagcctggtatcagcaaaaaccagggaaagcccctaagctcctgatctatgctgcatccactttgcaaagtggggtcccatcaaggttcagcggcagtggatctgggacagatttcactctcaccatcagctgcctgcagtctgaagattttgcaacttattactgtcaacagtattataattaccctcggacgttcggccaagggaccaaggtggaaatcaaac

SEQ ID NO: 12466 - DNA, 331 bp, Homo sapiens; identical to SEQ ID NO: 12366

SEQ ID NO: 12467 - DNA, 322 bp, Homo sapiens
gacatccagatgacccagtctccatcctccctgtctgcatctgtaggagacagagtcaccatcacttgccgggcaagtcagagcattagcaactatttaaattggtatcagcagaaaccagggaaagcccctaagctcctgatctatgctgcctccagtttgcaaagtggggtcccatcaaggtttaggggcagtggatctgggacagatttcactctcaccatcagcagtctgcaacctgaggattctgcaacttattactgtcaacagacttacagtaccccattcactttcggccctgggaccaaagtggatatcaaac

SEQ ID NO: 12468 - DNA, 322 bp, Homo sapiens
gacatccagatgacccagtctccatcctccctgtctgcatctgtaggagacagagtcaccatcacttgccgggcaagtcagagcattagcaactatttaaattggtatcagcagaaaccagggaaagcccctaagctcctgatctatgctgcatccagtttgcaaagtggggtcccatcaaggtttaggggcagtggatctgggacagatttcactctcaccatcagcagtctgcaacctgaggattctgcaacttattactgtcaacagacttacagtaccccattcactttcggccctgggaccaaagtggatatcaaac

SEQ ID NO: 12469 - DNA, 325 bp, Homo sapiens
gaaattgtgttgacgcagtctccaggcaccctgtctttgtctccaggggaaagagccaccctctcctgcagggccagtcagagtgttaccagcagccacttagcctggtaccagcagaaacctggccaggctcccaggctcctcatctatggtgcatccagcagggccactggcatcccagacaggttcagtggcagtgggtctgggacagacttcactctcaccatcagcagactggagcctgaagattttgcagtgtattactgtcagcagtatggtagctcacctcggacgttcggccaagggaccaaggtggaaatcaaac

SEQ ID NO: 12470 - DNA, 325 bp, Homo sapiens; identical to SEQ ID NO: 12469

SEQ ID NO: 12471 - DNA, 322 bp, Homo sapiens
gccatccggatgacccagtctccatcctcattctctgcatctacaggagacagagtcaccatcacttgtcgggcgagtcagggtattagcagttatttagcctggtatcagcaaaaaccagggaaagcccctaagctcctgatctatgctgcatccactttgcaaagtggggtcccatcaacgttcagcggcagtggatctgggacagatttcactctcaccatcagctgcctgcagtctgaagattttgcaacttattactgtcaacaatattatagttacccgtggacgttcggccaagggaccaaggtggaaatcaaac

SEQ ID NO: 12472 - DNA, 322 bp, Homo sapiens; identical to SEQ ID NO: 11504

SEQ ID NO: 12473 - DNA, 322 bp, Homo sapiens
gacatccagttgacccagtctccatccttcctgtctgcatctgtgggagacagggtcaccatcacttgccgggccagtcaggggtttagccgatatttagcctggtatcagcaaaaaccaggaaaagcccctaaactcctgatctaccaggtgtctattttggataatggggtcccatcaaggttcagcggcaggggatctggaacagagttcactctcacaatcagcggcctgcagcctgaggattttgcaacttattactgtctacagctcgctatgtacccattcaatttcggccctgggaccagactggatgtcaaac

SEQ ID NO: 12474 - DNA, 334 bp, Homo sapiens
cagtctgtgctgacgcagccgccctcagtgtctggggccccagggcagagggtcaccatctcctgcactgggagcagctccaacatcggggcaggttatgatgtacactggtaccagcagcttccaggaacagcccccaaactcctcatctatggtaacagcaatcggccctcaggggtccctgaccgattctctggctccaagtctggcacctcagcctccctggccatcactgggctccaggctgaggatgaggctgattattactgccagtcctatgacagcagcctgagtggtgtggtattcggcggagggaccaagctgaccgtcctag

SEQ ID NO: 12475 - DNA, 319 bp, Homo sapiens
tcctatgagctgactcagccaccctcagtgtccgtgtccccaggacagacagccagcatcacctgctctggagataaattgggggataaatatgcttgctggtatcagcagaagccaggccagtcccctgtgctggtcatctatcaagatagcaagcggccctcagggatccctgagcgattctctggctccaactctgggaacacagccactctgaccatcagcgggacccaggctatggatgaggctgactattactgtcaggcgtgggacagcagcattgtggtattcggcggagggaccaagctgaccgtcctag

SEQ ID NO: 12476 - DNA, 337 bp, Homo sapiens
gatattgtgatgactcagtctccactctacctacccgtcacccctggagagccggcctccatctcctgcaggtctagtcagagcctcctgtatacaaatggatacaactatttggattggtacctgcagaagccagggcagtctccacaactcctgatctatttgggttctagtcgggcctccggggtccctgacaggttcagtgtcagtggatcaggcacagattttacactgaggatcagcagagtggaggctgaggatgttggggtctattactgcatgcaaggtctacaaactcctcggactttcggccctgggaccaaagtggatatcaaac

SEQ ID NO: 12477 - DNA, 322 bp, Homo sapiens
cagtctgccctgactcagcctgcctccgtgtctgggtctcctggacagtcgatcaccatctcctgcactggaaccagcagtgatgttgagagttataatgttgtctcctggtaccaacagcacccaggcaaagcccccaaactcatgatttatgagggcactaagcggccctcaggggtttctaatcgcttctctggctccaagtctggcaacacggcctccctgacaatctctgggctccaggctgaggacgaggctgattattactgttgctcatatacaggtgggaaggtcttcggaactgggaccaaggtcaccgtcc

SEQ ID NO: 12478 - DNA, 325 bp, Homo sapiens
gaaattgtgttgacgcagtctccaggcaccctgtctttgtctccaggggaaagagccaccctctcctgcagggccagtcagagtgttagcagcagctacttagcctggtaccagcagaaacctggccaggctcccaggctcctcatctatggtgcatccagcagggccactggcatcccagacaggttcagtggcagtgggtctgggacagacttcactctcaccatcagcagactggagcctgaagattttgcagtgtattactgtcagcagtatggtagctcaacttggacgttcggccaagggaccaaggtggaaatcaaac

SEQ ID NO: 12479 - DNA, 322 bp, Homo sapiens
gaaattgtgttgacacagtctccagccaccctgtctttgtctccaggggaaagagccaccctctcctgcagggccagtcagagtgttagcaacttcttagcctggtaccaacagaaacctggccaggctcccaggctcctcatctatgatgcatccaacagggccactggcatcccagccaggttcagtggcagtgggtctgggacagacttcactctcaccatcagcagactggagcctgaagattttgcagtgtattactgtcagcagtatggtagctcaccgtggacgttcggccaagggaccaaggtggaaatcaaac

SEQ ID NO: 12480 - DNA, 322 bp, Homo sapiens
gacatccagatgacccagtctccttccaccctgtctgcatctgtaggagacagagtcaccatcacttgccgggccagtcagagtattagcaactggttggcctggtatcagcagaaaccagggaaagcccctaagctcctgatctttacggcgtctagtttagaaagtggggtcccatcaaggttcagcggcagtggatctgggacagaattcactctcaccatcagcagcctgcagcctgatgattttgcaacttattactgccaacagtataatagttattcctggacgttcggccaagggaccaaggtggaaatcaaac

SEQ ID NO: 12481 - DNA, 322 bp, Homo sapiens
tcctatgagctgactcagccaccctcaatttccgtgtccccaggacagacagccaggatcatctgctcaggagataaattgggggataagtatgtttcctggtatcaggagaagccaggccagtcccctatgttggtcatctatcaagataacaaacggccctcagagatccctgagcgattctctggctccaactctctgaacacagccactctgaccatcagcgggacccaggctttggatgaggctgactattactgtcaggcgtgggacaccaacacctatgtgctattcggcggagggaccaagctgaccgtcctag

SEQ ID NO: 12482 - DNA, 325 bp, Homo sapiens
tcctatgagctgacacagccaccctcggtgtcagtgtccccaggacaaacggccaggatcacctgctctggagatgcattgccaaaaagatatgcttattggtaccagcagaagtcaggccaggcccctgtgctggtcatctatgacgacaacaaacgaccctccgggatccctgagagattctctggctccagctcagggacaatggccaccttgactatcaatggggcccaggtggaggatgaagctgactactactgttactcaacagacagcagtgctaatcatagggtcttcggcggagggaccaagctgaccgtcctag

SEQ ID NO: 12483 - DNA, 322 bp, Homo sapiens; identical to SEQ ID NO: 6119

SEQ ID NO: 12484 - DNA, 331 bp, Homo sapiens; identical to SEQ ID NO: 10772

SEQ ID NO: 12485 - DNA, 337 bp, Homo sapiens
gatattgtgatgacccagactccactctctctgtccgtcacccctggacagccggcctccatctcctgcaagtctagtcagagcctcctgcatagtgatggaaagacctatttgtattggtacctgcagaagccaggccagcctccacagctcctgatctatgaagcttccaaccggttctctggagtgccagataggttcagtggcagcgggtcagggacagatttcacactgaaaatcagccgggtggaggctgaggatattggggtttattactgcatgcaaagtagacagtttcctctcactttcggcggagggaccaaggtggagatcaaac

SEQ ID NO: 12486 - DNA, 330 bp, Homo sapiens
cagtctgccctgactcagcctgcctccgtgtctgggtctcctggacagtcgatcaccatctcctgcaccggaaccagcagtgacgttggtggttatgactatgtctcctggtaccaacagtacccaggcaaagcccccaaactcatgatttatgaggtcagtaatcggccctcaggggtttctaatcgcttctctggctccaagtctggcaacacggcctccctgaccatctctgggctccaggctgaggacgaggctgattatcactgcagctcatatgcaagcggcagcactgtccttttcggcggagggaccaagctgaccgtccta

SEQ ID NO: 12487 - DNA, 322 bp, Homo sapiens; identical to SEQ ID NO: 10899

SEQ ID NO: 12488 - DNA, 322 bp, Homo sapiens
gccatccggctgacccagtctccatcctcattctctgcatctacaggagacagagtcaccatcacttgtcgggcgagtcagggtattagcagttatttagcctggtatcagcaaaaaccagggaaagcccctaagctcctgatctatgctgcatccactttgcaaagtggggtcccatcaaggttcagcggcagtggatctgggacagatttcactctcaccatcagctgcctgcagtctgaagattttgcaacttattactgtcaacagtattatagttacccgatcaccttcggccaagggacacgactggagattaaac

SEQ ID NO: 12489 - DNA, 316 bp, Homo sapiens
gaaattgtgttgacgcagtctccaggcaccctgtctttgtctccaggggaaagagccaccctctcctgcagggccagtcagagtgttagcagcagctacttagcctggtaccagcagaaacctggccaggctcccaggctcctcatctatggtgcatccagcagggccactggcatcccagacaggttcagtggcagtgggtctgggacagacttcactctcaccatcagcagactggagcctgaagattttgcagtgtattactgtcagcagtatggtaggggtttcggcggagggaccaaggtggagatcaaac

SEQ ID NO: 12490 - DNA, 319 bp, Homo sapiens; identical to SEQ ID NO: 1688

SEQ ID NO: 12491 - DNA, 322 bp, Homo sapiens
gacatccagatgacccagtctccatcctccctgtctgcatctgtaggagacagagtcaccatcacttgccgggcgagtcagggcattagcaattatttagcctggtatcagcagaaaccagggaaagttcctaagctcctgatctatgctgcatccactttgcaatcaggggtcccatctcggttcagtggcagtggatctgggacagatttcactctcaccatcagcagcctgcagcctgaagatgttgcaacttattactgtcaaaagtataacagtgccccgtggacgttcggccaagggaccaaggtggaaatcaaac

SEQ ID NO: 12492 - DNA, 325 bp, Homo sapiens
gaaattgtgttgacgcagtctccaggcaccctgtctttgtctccaggggaaagagccaccctctcctgcagggccagtcagagtgttagcagcagctacttagcctggtaccagcagaaacctggccaggctcccaggctcctcatctatggtgcatccagcagggccactggcatcccagacaggttcagtggcagtgggtctgggacagacttcactctcaccatcagcagactggagcctgaagattttgcagtgtattactgtcagcagtatggtaactcaccgctcactttcggcggagggaccaaggtggagatcaaac

SEQ ID NO: 12493 - DNA, 330 bp, Homo sapiens
cagtctgcgctgacccaggaagcctcggtgtcagggaccgtgggacagaaggtcaccctctcctgtactggaaacagcaacaacgttggaagttatgctgtgggctggtaccaacagatttctcacggtgctcccaaaactgtgatgtttggaaattctctgccctcagggatccctgaccgcttctctggctcaaagtctgggaccacagcctccctgactatctcgggcctctagcctgaggacgaggctgattattactgttcaacatgggactacagcctcagtgctctgtggtattcggcggagggaccaagctgaccgtcctag

SEQ ID NO: 12494 - DNA, 339 bp, Homo sapiens
acatcgtgatgacccagtctccagactccttgtctctgtctctcggcgagagggccaccatcaagtgcaagtccagccggactgttttatccacttccaactataagaaccacgtagcttggtaccagcagagaccggggcagcctccaaagttactcatttcctgggcatctacccggaactccggggtccctgaccgattcagtggcagcgggtctgcaacagatttcactctcaccatcagcggcctgcaggctgaggatgtggccctttattactgtcaacaatattatgaccttcctttctctttcggccctgggaccaaagtggagatcaaac

SEQ ID NO: 12495 - DNA, 319 bp, Homo sapiens
gaaattgtgttgacacagtctccagccaccctgtctttgtctccaggggaaagagccaccctctcctgcagggccagtcagagtgttagcagctacttagcctggtaccaacagaaacctggccaggctcccaggctcctcatctatgatgcatccaacagggccactggcatcccagccaggttcagtggcagtgggtctgggacagacttcactctcaccatcagcagcctagagcctgaagattttgcagtttattactgtcagcagcgtagcaactcgtacacttttggccaggggaccaagctggagatcaaac

SEQ ID NO: 12496 - DNA, 322 bp, Homo sapiens; identical to SEQ ID NO: 837

SEQ ID NO: 12497 - DNA, 322 bp, Homo sapiens
gccatccggatgacccagtctccatcctcattctctgcatctacaggagacagagtcaccatcacttgtcgggcgagtcagggtattagcagttatttagcctggtatcagcaaaaaccagggaaagcccctaagttcctgatctatgctgcatccactttgcaaagtggggtcccatcaaggttcagcggcagtggatctgggacagatttcactctcaccatcagctgcctgcagtctgaagattttgcaacttattactgtcaacagtattatagttaccctcggacgttcggccaagggaccaaggtggaattcaaac

SEQ ID NO: 12498 - DNA, 325 bp, Homo sapiens
gaaattgtgttgacacagtctccagccaccctgtctttgtctccaggggaaagagccaccctctcctgcagggccagtcagagtgttagcagctacttagcctggtaccaacagaaacctggccaggctcccaggctcctcatctatgatgcatccaacagggccactggcatcccagccaggttcagtggcagtgggtctgggacagacttcactctcaccatcagcagcctagagcctgaagattttgcagtttattactgtcagcagcgtagcaactggcctcggatcaccttcggccaagggacacgactggagattaaac

SEQ ID NO: 12499 - DNA, 319 bp, Homo sapiens
gacatccagatgacccagtctccatcctccctgtctgcatctgttgcagacagagtcaccatcacttgccgggcaagtcagagcattagcagctatttaaattggtatcagcagaaaccagggaaagcccctaagctcctgatctatgctgcatccagtttgcaaagtggggtcccatcaaggttcagtggcagtggatctgggacagatttcactctcaccatcagcagtctgcaacctgaagattttgcaacttactactgtcaacagagttacagtaccctcactttcggccctgggaccaaagtggatatcaaac

SEQ ID NO: 12500 - DNA, 322 bp, Homo sapiens; identical to SEQ ID NO: 6117

SEQ ID NO: 12501 - DNA, 325 bp, Homo sapiens
gaaattgtgttgacgcagtctccaggcaccctgtctttgtctccaggggaaagagccaccctctcctgcagggccagtcagagtgttagcagcagctacttagcctggtaccagcagaaacctggccaggctcccaggctcctcatctatggtgcatccagcagggccactggcatcccagacaggttcagtggcagtgggtctgggacagacttcactctcaccatcagcagactggagcctgaagattttgcagtgtattactgtcagcagtatggtagctcgccgctcactttcggcggagggaccaaggtggagatcaaac

SEQ ID NO: 12502 - DNA, 331 bp, Homo sapiens
cagtctgccctgactcagcctgcctccgtgtctgggtctcctggacagtcgatcaccatctcctgcactggaaccaacagtgacgttggtggttataactatgtctcctggtaccaacagcacccaggcaaagcccccaaagtcatgatttatgaggtcagtaatcggccctcaggggtttctaatcgcttctctggctccaagtctggcaacacggcctccctgaccatctctgggctccaggctgaggacgaggctgattattactgcagctcatatacaaacagcagcactgtggtattcggcggagggaccaagctgaccgtcctag

SEQ ID NO: 12503 - DNA, 331 bp, Homo sapiens
cagtctgtgttgacgcagccgccctcagtgtctgcggcccctggacagaaagtcaccatctcctgctctggaaccagctccaacattgggaatactggtgtatcctggtaccagcaggtcccgggaacagcccccaaactcctcatctatgacgataataaacgaccctcagggattcctgaccggttctctggctccaagtctggctcgtcagccaccctgggcatcaccgggctccagactggggacgaggccgattattactgcggaacatgggataccagtctgacttctggagtgttcggtggagggaccaagctgaccgtcctag

SEQ ID NO: 12504 - DNA, 331 bp, Homo sapiens
cagtctgtgttgacgcagccgccctcagtgtctgcggccccaggacagaaggtcaccatctcctgctctggaagcacctccaacattgggaataattatgtatcctggttccagcagctcccaggaacagcccccaaactcctcatctatgacaataataaacgaccctcagggattcctgaccgattctctggctccaagtctggcacgtcagccaccctgggcatcaccggactccagactggggacgaggccgattattactgcggaacatgggataacagcctgactgctggagtgttcggcggagggaccaagctgaccgtcctag

SEQ ID NO: 12505 - DNA, 331 bp, Homo sapiens
cagtctgtgttgacgcagccgccctcagtgtctgcggcccctggacagaaggtcaccatctcctgctctggaaccggctccaacattgggagtaatggtgtatcctggtaccaacaggtcccaggaacagcccccaaactcctcatctatgacgataataaacgaccctcagggattcctgaccggttctctggctccaagtctggctcgtcagccaccctgggcatcaccgggctccagactggggacgaggccgattattactgcggaacatgggataccagcctgactgctggagtgttcggtggagggaccaagctgaccgtcctag

SEQ ID NO: 12506 - DNA, 329 bp, Homo sapiens
cagtctgccctgactcagcctccctccgcgtccgggtctcctggacagtcagtcaccatctcctgcactggaaccagcagtgacgttggtggttataactatgtctcctggtaccaacagtacccaggcaaagcccccaaactcatgatttatgaggtcagtaagcggccctcaggggtccctgatcgcttctttggctccaagtctggcaacacggcctccctgaccgtctctggactccaggctgaggatgaggcagattattactgcagctcaattgcaggcaggaacaatttgatattcggcggagggaccaagctgaccgtcct

SEQ ID NO: 12507 - DNA, 331 bp, Homo sapiens
cagtccctgctgactcagccaccctcagcgtctgggacccccgggcagagggtcaccatctcttgttctggaagcaactccaacatcggaagtaattttgttttctggtaccagctgctcccaggaacggcccccaaactccttatctataagaataatcaacggccctcaggggtccctgaccgattctctggctccaagtctggcacctcagcctccctggccatcagtgggctccggtccgaggatgaggctgattattactgtgcatcatgggatgacagcctcattggtgtgatattcggcggagggaccaagctgaccgtcctag

SEQ ID NO: 12508 - DNA, 343 bp, Homo sapiens
gacatcgtgatgacccagtctccagactccctggctgtgtctctgggcgagagggccaccatcaactgcaagtccagccagagtgttttatacagctccaacaataagaactacttagcttggtaccagcagaaaccaggacagcctcctaagctgctcgtttactgggcatctacccgggaatccggggtccctgaccgattcagtggcagcgggtctgggacagatttcactctcaccatcagcagcctgcaggctgaagatgtggcagtttattactgtcagcaatattatggtactcccccgtggacgttcggccaagggaccaaggtggaaatcaaac

SEQ ID NO: 12509 - DNA, 322 bp, Homo sapiens; identical to SEQ ID NO: 4554

SEQ ID NO: 12510 - DNA, 319 bp, Homo sapiens
gaaattgtgttgacacagtctccagccaccctgtctttgtctccaggggaaagagccaccctctcctgcagggccagtcagggtgttagcagctacttagcctggtaccagcagaaacctggccaggctcccaggctcctcatctatgatgcatccaacagggccactggcatcccagccaggttcagtggcagtgggcctgggacagacttcactctcaccatcagcagcctagagcctgaagattttgcagtttattactgtcagcagcgtagcaactggctcactttcggcggagggaccaaggtggagatcaaac

SEQ ID NO: 12511 - DNA, 325 bp, Homo sapiens
gaaattgtgttgacgcagtctccaggcaccctgtctttgtctccaggggaaagagccaccctctcctgcagggccagtcagagtgttagcagcagctacttagcctggtaccagcagaaacctggccaggctcccaggctcctcatctatggtgcatccagcagggccactggcatcccagacaggttcagtggcagtgggtctgggacagacttcactctcaccatcagcagactggagcctgaagattttgcagtgtattactgtcagcactatggtagctcaccattcactttcggccctgggaccaaagtggatatcaaac

SEQ ID NO: 12512 - DNA, 322 bp, Homo sapiens; identical to SEQ ID NO: 12356

SEQ ID NO: 12513 - DNA, 319 bp, Homo sapiens
tcctatgagctgactcagccaccctcagtgtccgtgtccccaggacagacagccagcatcacctgctctggagataaattgggggataaatatgcttgctggtatcagcagaagccaggccagtcccctgtgctggtcatctatcaagatagcaagcggccctcagggatccctgagcgattctctggctccaactctgggaacacagccactctgaccatcagcgggacccagggaatggatgaggctgactattactgtcaggcgtgggacagcagcactgcagtattcggcggagggaccaagctgaccgtcctag

SEQ ID NO: 12514 - DNA, 331 bp, Homo sapiens; identical to SEQ ID NO: 12447

SEQ ID NO: 12515 - DNA, 319 bp, Homo sapiens
tcctatgagctgactcagccaccctcagtgtccgtgtccccaggacagacagccagcatcacctgctctggagataaattgggggataaatatgcttgctggtatcagcagaagccaggccagtcccctatcctggtcatctatcacgataccaagcggccctcaggaatccctgagcgattctctggctccaactctgggaacacagccactctgaccatcagcgggacccaggctatggatgaggctgactattactgtcaggcgtgggacagcagaactgtggtattcggcggagggaccaagctgaccgtcctag

SEQ ID NO: 12516 - DNA, 325 bp, Homo sapiens
gaaattgtgttgacgcagtctccaggcaccctgtctttgtctccaggggaaagagccatcctctcctgcagggccagtcagagtgttagcagtagctacttagcctggtaccagcaaaaacctggccaggctcccaggctcctcatctctggtacatccaccagggccactggcattgcagacaggttcagtggcagtgggtctgggacagacttcactctcaccatcagcagactggagcctgaagattttgcagtgtattactgtcaccagtatgatagctcgcctaggacttttggccaggggaccaagctggagatcaaac

SEQ ID NO: 12517 - DNA, 337 bp, Homo sapiens
gatattgtgatgactcagtctccactctccctgcccgtcacccctggagagccggcctccatctcctgcaggtctagtcagagcctcctgcatagtaatggatacaactatttggattggtacctgcagaagccagggcagtctccacagctcctgatctatttgggttctaatcgggcctccggggtccctgacaggttcagtggcagtggatcaggcacagattttacactgaaaatcagcagagtggaggctgaggatgttggggtttattactgcatgcaaactctacaaactcctatcaccttcggccaagggacacgactggagattaaac

SEQ ID NO: 12518 - DNA, 337 bp, Homo sapiens
cagtctgccctgactcagcctgcctccgtgtctgggtctcctggacagtcgagcaccatctcctgcactggaaccagcagtgacgttggtgcttatgactatgtctcctggtaccaggtacacccaggcaaagcccccaaactcatgatctatgatgtcagtaatcggccctcaggggtttctaatcgcttctctggctccaagtctggcaacacggcctccctgaccatctctgggctccaggctgaggacgaggctgattattactgcagctcatatacaaacaacagcactctttatgtggtcttcggcggagggaccaagctgaccgtcctag

SEQ ID NO: 12519 - DNA, 322 bp, Homo sapiens
gacatccagatgacccagtctccatcctccctgtctgcatctgtaggagacagagtcaccatcacttgccgggcaagtcagagcattagcagctatttaaattggtatcagcagaaaccagggaaagcccctaaactcctaatctatgctgcaggaagtttgcaaagtggggtcccatcaaggttcagagccagtggatctgggacagatttcactctcaccatcagcagtctgcaacctgaagattttgcaacttactactgtcaacagagttacagtaccccattcactttcggccctgggaccaaagtggatatcaaac

SEQ ID NO: 12520 - DNA, 337 bp, Homo sapiens
gatattgtgatgactcagtctccactctccctgcccgtcacccctggagagccggcctccatctcctgcaggtctagtcagagcctcctgcagagtaatggatactactatttggattggtacctgcagaaaccagggcagtctccacagctcttgatctatttgggttctaatcgggcctccggggtccctgacaggttcagtggcagtggatcaggcacagattttacactgaaaatcagcagagtggaggctgaggatgttggggtttattactgcatgcaacctctacaaactcctcagactttcggcggagggaccaaggtggagatcaaac

SEQ ID NO: 12521 - DNA, 331 bp, Homo sapiens
cagtctgccctgactcagcctgcctccgtgtctgggtctcctggacagtcgatcaccatctcctgcactggaaccagcagtgacattggtggttataactatgtctcctggtaccaacaccacccaggcaaagcccccaaactcatgatttatgaggtcagtaatcggccctcaggggtttctaatcgcttctctggctccaagtctggcaacacggcctccctgaccatctctgggctccaggctgaggacgaggctgattattactgcagctcatatacaatcatcaacactctcgtgttcggcggagggaccaagctgaccgtcctag

SEQ ID NO: 12522 - DNA, 331 bp, Homo sapiens
cagtctgtgttgacgcagccgccctcagtgtctgcggccccaggacagaaggtcaccatctcctgctctggaagcagctccaacattgggaataattatgtatcctggtaccagcagttcccaggaacagtccccaaactcctcatctatgaaaataataagcgaccctcagggattcctgaccgattctctggctccaagtctggcacgtcagccaccctgggcatcaccggactccagactggggacgaggccgattattactgcggaacatgggatagcagcctgagtgcgggggtattcggcggagggaccaagctgaccgtcctag

SEQ ID NO: 12523 - DNA, 325 bp, Homo sapiens
tcctatgtgctgactcagccaccctcggtgtcagtggccccaggacagacggccaggattacctgtgggggaaacaacattggaagtaaaagtgtgcactggtaccagcagaagacaggccaggcccctgtgctggtcgtcgatgatgaaagcgaccggccctcagggatccctgagcgattctctggctccaactctgggaacacggccaccctgaccatcagcagggtcgaagccggggatgaggccgactattactgtcaggtgtgggatagtagtagtgatcattgggtgtttggcggagggaccaacctgaccgtcctag

SEQ ID NO: 12524 - DNA, 325 bp, Homo sapiens
gaaatagtgatgacgcagtctccagccaccctgtctgtgtctccaggggaaagagccaccctctcctgcagggccagtcagagtggtagcagcaacttagcctggtaccagcagaaacctggccaggctcccaggctcctcatctatgatgcatccaccagggccactggtatcccagccaggttcagtggcagtgggtctgggacagagttcactctcaccatcagcagcctgcagtctgaagattttgcagtttactactgtcagcagtataataactggcctccgaacacttttggccaggggaccaagctggagatcaaac

SEQ ID NO: 12525 - DNA, 322 bp, Homo sapiens
gacatccagatgacccagtctccatcctccctgtctgcatctgtaggagacagagtcaccatcacttgccgggcaagtcagagcattaacaactatttaaattggtatcaggagaaaccaggtaaagcccctaagctcctgatctatgctgcatccagtttgcaaagtggggtcccatcaagattcagtggcagtggatctgggacagatttcactctcaccatcagcagtctgcaacctggagattttacaacttactactgtcaacagagtcacagtaccccgtacatttttggccaggggaccaagctggagatcaaac

SEQ ID NO: 12526 - DNA, 328 bp, Homo sapiens
gaaatagtgatgacgcagtctccagccaccctgtctgtgtctccaggggaaagagccaccctctcctgcagggccagtcagagtgttgacagcaacttagcctggtaccagcagaaacctggccaggctcccaggctcctcatctatggtacatccaccagggccactggtatcccagccaggttcagtggcagtgggtctgggacagagttcactctcaccatcagcagcctgcagtctgaagattttgcagtttattactgtcagcaatataataactggcctccgggggggacgttcggccaagggaccaaggtggagatccaac

SEQ ID NO: 12527 - DNA, 328 bp, Homo sapiens
gaaatagtgatgacgcagtctccagcctccctgtctgtgtctccaggggaaagagccaccctctcctgcagggccagtcagagtgttgacagcaacttagcctggtaccggcagaaacctggccaggctcccaggctcctcatctatggtgcatccaccagggccactgatatcccagccaggttcagtggcagtgggtctgggacagagttcactctcaccatcagcagcctgcagtctgaagattttgcagtttattactgtcagcaatataataactggcctccgggggggacgttcggccaagggaccaaggtggagatccaac

SEQ ID NO: 12528 - DNA, 331 bp, Homo sapiens
cagtctgccctgactcagcctgcctccgtgtctgggtctcctggacagtcgatcaccatctcctgcactggaaccagcagtgacgttggtgcttataactctgtctcctggtaccaacagcacccaggcaaagcccccaaactcctgatttatgatgtcagtaatcggccctcaggggtttctaatcgcttctctggctccaagtctggcaacacggcctccctgaccatctctgggctccaggctgaggacgaggctgattattactgcagctcatatacaagcagcaacattgtggtattcggcggagggaccaagctgaccgtcctag

SEQ ID NO: 12529 - DNA, 322 bp, Homo sapiens
gaaattgtgttgacgcagtctccaggcaccctgtctttgtctccaggggaaagagccaccctctcctgcagggccagtcagagtgttagcagcagctacttagcctggtaccagcagaaacctggccaggctcccaggctcctcatctatggtgcatccagcagggccactggcatcccagacaggttcagtggcagtgggtctgggacagacttcactctcaccatcagcagactggagcctgaagattttgcagtgtattactgtcagcagtatggtagctcacgcacgttcggccaagggaccaaggtggaaatcaaac

SEQ ID NO: 12530 - DNA, 334 bp, Homo sapiens
cagtctgtgctgactcagccaccctcagcgtctgggacccccgggcagagggtcaccatctcttgttctggaagcagctccaacatcggaagtaattatgtatactggtaccagcagctcccaggaacggcccccaaactcctcatctataggaataatcagcggccctcaggggtccctgaccgattctctggctccaagtctggcacctcagcctccctggccatcagtgggctccggtccgaggatgaggctgattattactgtgcagcatgggatgacagcctgagtggtgatgtggtattcggcggagggaccaagctgaccgtcctag

SEQ ID NO: 12531 - DNA, 322 bp, Homo sapiens; identical to SEQ ID NO: 8302

SEQ ID NO: 12532 - DNA, 331 bp, Homo sapiens
cagtctgccctgactcagcctgcctccgtgtctgggtctcctggacagtcgatcaccatctcctgcactggaaccagcagtgacgttggtggttataactatgtctcctggtaccaacaacacccaggcaaagcccccaaactcataatttatgatgtcagtaatcggccctcaggggtttctaatcgcttctctggctccaagtctggcaacacggcctccctgaccatctctgggctccaggctgaggacgaggctgattattactgcagctcatatagaagcgacagcactgtggtattcggcggggggaccaagctgaccgtcctag

SEQ ID NO: 12533 - DNA, 325 bp, Homo sapiens
gaaattgtgttgacgcagtctccaggcaccctgtctttgtctccaggggaaagagccaccctctcctgcagggccagtcagagtgttagcagcatctacttagcctggtaccagcagaaacctggccaggctcccaggctcctcatctatggtgcatccagcagggccactggcatcccagacaggttcagtggcagtgggtctgggacagacttcactctcaccatcagcagactggagcctgaagattttgcagtgtattactgtcagcagtatggtagctcactgtggacgttcggccaagggaccaaggtggaaatcaaac

SEQ ID NO: 12534 - DNA, 328 bp, Homo sapiens
gaaattgtgttgacgcagtctccaggcaccctgtctttgtctccaggggaaagagccaccctctcctgcagggccagtcagagtgttagcagcagctacttagcctggtaccagcagaagcctggccaggctcccaggctcctcatctatgctgcatccagcagggccattggcatcccagacaggttcagtggtagtgggtctgggacagacttcactctcaccatcagcagactggagcctgaagattttgcagtgtattactgtcagcagtatggtagctcaccttcctggacgttcggccaagggaccaaggtggaaatcaaac

SEQ ID NO: 12535 - DNA, 334 bp, Homo sapiens
cagtctgccctgactcagcctccctccgcgtccgggtctcctggacagtcagtcaccatctcctgcactggaaccagcagtgacgttggtggttataactatgtctcctggtaccaacaccacccaggcaaagcccccaaactcatgatttatgaggtcactaagcggccctcaggggtccctgatcgcttctttggctccaagtctggcaacacggcctccctgaccgtctctgggctccaggctgatgatgaggctgattattactgcagctcatatgcaggcagcaacaattttgtggtattcggcggagggaccaagctgaccgtcctag

SEQ ID NO: 12536 - DNA, 322 bp, Homo sapiens; identical to SEQ ID NO: 851

SEQ ID NO: 12537 - DNA, 322 bp, Homo sapiens
gacatccagatgacccagtctccttccaccctgtctgcatctgtaggagacagagtcaccatcacttgccgggccagtcagagtattagtagctggttggcctggtatcagcagaaaccagggaaagcccctaagctcctgatctataaggcgtctagtttagaaagtggggtcccatcaaggttcagcggcagtggatctgggacagaattcactctcaccatcagcagcctgcagcctgatgattttgcaacttattactgccaacagtataatagttatctgtggacgttcggccaagggaccaaggtggaaatcaaac

SEQ ID NO: 12538 - DNA, 322 bp, Homo sapiens
gacatccagatgacccagtctccatcctccctgtctgcatctgtaggagacagagtcaccatcacttgccgggcaagtcagagcattagcagctatttaaattggtatcagcagaaaccagggaaagcccctaagctcctgatctatgctgcatccagtttgcaaagtggggtcccatcaaggttcagtggcagtggatctgggacagatttcactctcaccatcagcagtctgcaacctgaagattttgcaacttactactgtcaacagagttacagtaccccattcactttcggccctgggaccaaagtggatatcaaac

SEQ ID NO: 12539 - DNA, 331 bp, Homo sapiens; identical to SEQ ID NO: 4050

SEQ ID NO: 12540 - DNA, 325 bp, Homo sapiens; identical to SEQ ID NO: 3560

SEQ ID NO: 12541 - DNA, 322 bp, Homo sapiens
tcctatgagctgagtcaaccaccctcagtgtccgtgtccccaggacagacagccagcgtcacctgctctggagatgacttgggggataaatatgtttgctggtatcagcagaaaccaggccagtcccctgtgctggtcatgtatcaggatgacaagcggccctcagggatccctgagcgattctctggctccaactctgggaacacagccactctgaccatcagcgggacgcaggctacggatgaggctgactattactgtcaggtgtgggacaccagctcccatgtggaattcggcggagggaccaaggtgaccgtcctag

SEQ ID NO: 12542 - DNA, 322 bp, Homo sapiens; identical to SEQ ID NO: 10470

SEQ ID NO: 12543 - DNA, 319 bp, Homo sapiens
tcctatgagctgactcagccaccctcactgtccatgtccccaggacagacagccaccatcacctgctctggagataaattgggggatagatatgtttgctggtatcggcagaagccaggccagtcccctgtggtggtcatctatgaagatactaagcggccctcagggatccctgagcgattctctggctccaactctgggaacacagccactctgaccatcagcgggacccagcctatggatgaggctgtctattactgtcaggcgtgggacgccactagtgtggaattcggcggagggaccaagctgaccgtcctag

SEQ ID NO: 12544 - DNA, 338 bp, Homo sapiens
gacatcgtgatgacccagtctccagactccctggctgtgtctctgggcgagagggccaccatcaactgcaagtccagccagagtgttttatacaattacaacaataagaactacttagcttggtaccagcagaaaccaggacagcctcctaagctgctcatttactgggcatctacccgggaatccggggtccctgaccgattcagtggcagcgggtctgggacagatttcactctcaccatcagcagcctgcaggctggagatgtggcagtttattactgtcagcaatatcatactactcccctcactttcggcggagggaccaaggtggagatcaa

SEQ ID NO: 12545 - DNA, 331 bp, Homo sapiens
cagtctgccctgactcagcctgcctccgtgtctgggtctcctggacagtcgatcaccatctcctgcactggaaccagcagtgacgttggtggttataactatgtctcctggtaccagcaacacccaggcaaagcccccaaactcatgatttatgaggtcagtaatcggccctcaggggtttctaatcgcttctctggctccaagtctggcaacacggcctccctgaccatctctgggctccaggctgaggacgaggctgattattactgcagttcatatacaagcagtagcactctggtattcggcggagggaccaagttgaccgtcctag

SEQ ID NO: 12546 - DNA, 322 bp, Homo sapiens
tcctatgagctgacacagccaccctcggtgtcagtgtccccaggacaaacggccaggatcacctgctctggagatgcattgccaaaaaaatatgctttttggtaccaacagaagtcaggccaggcccctgtactggtcatctatgaggacagcaaacgaccctccgggatccctgagagatactctggctccagctcagggacaatggccaccttgactatcagtggggcccaggtggaggatgaagctgacttctactgttcctcaacagacagcagtggtgaagtgatattcggcggagggaccaagctgaccgtcctag

SEQ ID NO: 12547 - DNA, 325 bp, Homo sapiens
gaaattgtgttgacgcagtctccaggcaccctgtctttgtctccaggggaaagagccaccctctcctgcagggccagtcagagtgttagcagcaactacttagcctggtaccagcagaaacctggccaggctcccaggctcctcatctatggtgcatccagcagggccactggcttcccagacaggttcagtggcagtgggtctgggacagacttcactctcaccatcagcagactggagcctgaagattttgcagtgtattactgtcagcagtatggtagctcaccgatcaccttcggccaagggacacgactggagattaaac

SEQ ID NO: 12548 - DNA, 322 bp, Homo sapiens
gacatccagatgacccagtctccttccaccctgtctgcatctgtaggagacagagtcaccatcacttgccgggtcagtcagagtattaatagttggttggcctggtatcagcagaaaccagggaaagcccctaaggtcctgatcaataaggcgtctagtttagaaagtggggtcccatcaaggttcagcggcagtggatctgggacagaattcactctcaccatcagcagcctgcagcctgatgattttgcaacttattattgccaacagtataatagttattctcggacgttcggccaagggaccaaggtggaaatcaaac

SEQ ID NO: 12549 - DNA, 337 bp, Homo sapiens
gatattgtgatgactcagtctccactctccctgcccgtcacccctggagagccggcctccatctcctgcaggtctagtcagaacctcctgcatactaatggctacaactatgtggattggtacctgcagaagccagggcagtctccacaggtcctgatctatttgggttctagtcgggcccccggagtccctgacaggttcagtggcagtggatcaggcacagattttacactggaaatcagcagggtggaggctgaggatgttggactttactactgcatgcaagctctacagatccctcggacgttcggccaagggaccaaggtggagatcaaac

SEQ ID NO: 12550 - DNA, 317 bp, Homo sapiens; identical to SEQ ID NO: 12359

SEQ ID NO: 12551 - DNA, 337 bp, Homo sapiens
gatattgtgatgactcagtctccactctccctgcccgtcacccctggagagccggcctccatctcctgcaggtctagtcagagcctcctgcatagtaatggatacaactatttagactggtacctgcagaagccagggcagtctccacaactcctgatctatttgggttctaatcgggcctccggggtccctgataggttcagtgtcagtggatcaggcacagattttacactgcaaatcagcagagtggaggctgaggatgttggggtttattactgcatgcaagctctacaaactcctcggacttttggccaggggaccaagctggagatcaaac

SEQ ID NO: 12552 - DNA, 334 bp, Homo sapiens
cagtctgtgctgacgcagccgccctcagtgtctggggccccagggcagagggtcaccatctcctgcactgggagcagctccaacatcggggcaggttatgatgtacactggtaccagcagcttccaggaacagcccccaaactcctcatctatgataacagcaatcggccctcaggggtccctgaccgattctctggctccaagtctggcacctcagcctccctggccatcactgggctccaggttgaggatgaggctgattattactgccagtcctatgacagcagcctgagtgcccgggtgttcggcggagggaccaaggtgaccgtcctag

SEQ ID NO: 12553 - DNA, 322 bp, Homo sapiens; identical to SEQ ID NO: 10899

SEQ ID NO: 12554 - DNA, 337 bp, Homo sapiens
gatattgtgatgactcagtctccactctccctgcccgtcacccctggagagccggcctccatctcctgcaggtctagtcagagcctcctgcatagtaatggatacaactatttggattggtacctgcagaagccagggcagtctccacaactcctgttctatttgggttctaatcgggcctccggggtccctgacaggttcagtgtcagtggatcaggcacagattttacactgaaaatcagcagagtggaggctgaggatgttggggtttattactgcatgcaaggtctacaaacttctcggacgttcggccaagggaccaaggtggaaatcaaac

SEQ ID NO: 12555 - DNA, 337 bp, Homo sapiens
cagtctgtgctgacgcagccgccctcagtgtctggggccccagggcagagggtcaccatctcctgcactgggagcagctccaacatcggggcaggttatgatgtacactggtaccagcagcttccaggaacagcccccaaactcctcatctatggtaacagcaatcggccctcaggggtccctgaccgattctctggctccaagtctggcacctcagcctccctggccatcactgggctccaggctgaggatgaggctgattattactgccagtcctatgacagcagcctgagtggccatgtggtattcggcggagggaccaagctgaccgtcctag

SEQ ID NO: 12556 - DNA, 340 bp, Homo sapiens
gacatcgtggtgacccagtctccagactccctggctgtgtctctgggcgagagggccaccatcaactgcaagtctagccagagtgttttctacagctccgacaataagaactacctagcttggtaccagcagaaagcaggacagcctcctaaggtgctcatgtactgggcatctacccgggaatccggggtccccgaccgattcagtggcagcgggtctgggacagatttcactctcaccatcagcagcctgcaggctgaagatgtggcagtttattactgtcagcaatatcatactactccgtgggcgttcggccaagggaccaaggtggagatcaaac

SEQ ID NO: 12557 - DNA, 319 bp, Homo sapiens
tcctatgagctgactcagccaccctcagtgtccgtgtccccaggacagacagccagcatcacctgctctggagataaattgggggataaatatgcttgctggtatcagcagaagccaggccagtcccctgtgctggtcatctatcaagatagcaagcggccctcagggatccctgagcgattctctggctccaactctgggaacacagccactctgaccatcagcgggacccaggctatggatgaggctgactattactgtcagacgtgggacagcagcttcgtggtattcggcggagggaccaagctgaccgtcctag

SEQ ID NO: 12558 - DNA, 322 bp, Homo sapiens
gacatccagatgacccagtctccatcttctgtgtctgcatctgtaggagacagagtcaccatcacttgtcgggcgagtcagggtattagcaggtggttagcctggtatcagcagaaatcagggaaagcccctaagctcctgatctatgctgcatccaatttgcaaagtggggtcccatcaaggttcagcggcagtggatctgggacagatttcactctcactatcagcagcctgcagcctgaagattttgcaacttactattgtcaacaggctaacagtttccctcggactttcggccctgggaccaaagtggatatcaaac

SEQ ID NO: 12559 - DNA, 331 bp, Homo sapiens
cagtctgccctgactcagcctgcctccgtgtctgggtctcctggacagtcgatcaccatctcctgcactggaaccagcagtgacgttggtggttataactatgtctcctggtaccaacagcacccaggcaaagcccccaaacgcatgatttatgaggtcagtaatcggccctcagggatttctgatcgcttctctggctccaagtctggcaacacggcctccctgaccatctctgggctccaggctgaggacgaggctgattattactgcagctcatatagaagtgacagcactgtggcattcggcggagggaccaagctgaccgtcctag

SEQ ID NO: 12560 - DNA, 337 bp, Homo sapiens
gatattgtgatgactcagtctccactctacctgcccgtcacccctggagagccggcctccatctcctgcaggtctagtcagagcctcctgcatagaaatggatacaactatttggattggtacctgcagaagccagggcagtctccacaactcctgatctatttgggttctagtcgggcctccggggtccctgacaggttcagtgtcagtggatcaggcacagattttacactgaggatcagcagagtggaggctgaggatgttggggtctattactgcatgcaaggtctacaaactcctcggactttcggccctgggaccaaagtggatatcaaac

SEQ ID NO: 12561 - DNA, 325 bp, Homo sapiens
gacatccagatgacccagtctccatcctccctgtctgcatctgtaggagacagagtcaccatcacttgccgggcaagtcagggcattagaaatgatttaggctggtatcagcagaaaccagggaaagcccctaagcgcctgatctatgctgcatccagtttgcaaagtggggtcccatcaaggttcagcggcagtggatctgggacagaattcactctcacaatcagcagcctgcagcctgaagattttgcaacttactactgtcaacagagttacagtacccctccgtggacgttcggccaagggaccaaggtggaaatcaaac

SEQ ID NO: 12562 - DNA, 328 bp, Homo sapiens
gaaattgtgttgacgcagtctccaggcaccctgtctttgtctccaggggaaagagccaccctctcctgcagggccagtcagagtgttagcagcagctacttagcctggtaccagcagaaacctggccaggctcccaggctcctcatctatggtgcatccagcagggccactggcatcccagacaggttcagtggcagtgggtctgggacagacttcactctcaccatcagcagactggagcctgaagattttgcagtgtattactgtcagcagtatggtagctcacctccaggcactttcggcggagggaccaaggtggagatcaaac

SEQ ID NO: 12563 - DNA, 322 bp, Homo sapiens
gaaattgtgttgacgcagtctccaggcaccctgtctttgtctccaggggaaagagccaccctctcctgcagggccagtcagagtgttatcaccacctccttggcctggtaccagcagaaacgtggccaggctcccaggctcctcatctatggtgcatccaacagggccactggcatcccagacaggtttagtggcagtgggtctgggacagacttcactctcaccatcagcagactggagcctgaagattttgcagtgtattactgtcagcaatatggtagctcattcactttcggccctgggaccaaagtggatatcaaac

SEQ ID NO: 12564 - DNA, 334 bp, Homo sapiens
cagtctgtgctgacgcagccgccctcagtgtctggggccccagggcagagggtcaccatctcctgcactgggagcagctccaacatcggggcaggttatgatgtacactggtaccagcagcttccaggaacagcccccaaactcctcatctatgttaacagcaatcggccctcaggggtccctgaccgattctctggctccaagtctggcacctcagcctccctggccatcactgggctccaggctgaggatgaggctgattattactgccagtcccatgacagcagcctgagtggtgtggtattcggcggagggaccaagctgaccgtcctag

SEQ ID NO: 12565 - DNA, 340 bp, Homo sapiens
gacatcgtgatgacccagtctccagactccctggctgtgtctctgggcgagagggccaccatcaactgcaagtccagccagagtattttatacagctccaacaataagaactacttagcttggtaccagcagaaagcaggacagcctcctaagctgctcttttactgggcatctacccgggaatccggggtccctgaccgattcagtggcagcgggtctgggacagatttcactctcaccatcagcagcctgcaggctgaagatgtggcagtttattactgtcagcaatattatactactccgtacacttttggccaggggaccaagctggagatcaaac

SEQ ID NO: 12566 - DNA, 322 bp, Homo sapiens
gacatccagatgacccagtctccatcctccctgtctgcatctgtaggagacagagtcaccatcacttgccgggcaagtcagggcattagaaatgatttaggctggtatcagcagataccagggaaagcccctaagcgcctgatctatgctgcatccagtttgcaaagtggggtcccatcaagattcagcggcagtggatctgggacagaattcactctcacaatcagcagcctgcagcctgaagattttgcaacttattattgtctccagcataatagttacccgtacacttttggccaggggaccaagctggagatcaaac

SEQ ID NO: 12567 - DNA, 325 bp, Homo sapiens; identical to SEQ ID NO: 12436

SEQ ID NO: 12568 - DNA, 322 bp, Homo sapiens; identical to SEQ ID NO: 837

SEQ ID NO: 12569 - DNA, 331 bp, Homo sapiens
cagtctgccctgactcagcctccctccgcgtccgggtctcctggacagtcagtcaccatctcctgcactggaaccagcagtgacgttggtacttataactatgtctcctggtaccaacagtacccaggcaaagcccccaaactcatgatttatgaggtcagtaagcggccctcaggggtccctgatcgcttctttggctccaagtctggcaacacggcctccctgaccgtctctgggctccaggctgaggatgaggctgattattactgcagctcatatacagccagcaacaatgtggtgttcggcggagggaccaagctgaccgtcgtag

SEQ ID NO: 12570 - DNA, 325 bp, Homo sapiens
tcctatgagctgacacagccaccctcggtgtcagtgtccccaggacagacggccaggatcacctgctctggagatgcattgccaaagcaatatgcttattggtaccagcagaagccaggccaggcccctttcctggtgatatgtaaagacagtgagaggccctcagggatccctgagcgattctctggctccagctcagggacaacagtcacgttgaccatcagtggagtccaggcagaagacgaggctgactattactgtcaatcagcagacagcagtggtacttatgtgatattcggcggagggaccaagctgaccgtcctag

SEQ ID NO: 12571 - DNA, 325 bp, Homo sapiens
gaaattgtgttgacgcagtctccaggcaccctgtctttgtctccaggggaaagagccaccctctcctgcagggccagtcagagtgttagcagcaactatttagcctggtaccagcagaaacctggccaggctcccaggctcctcatctatgctgcatccagcagggccactgacatcccaagcaggttcagtggcagtgggtctgggacagacttcactctcaccatcagcagactggagcctgaagattttgcagtgtatcactgtcagcactatggtagcccaacgtacacttttggccaggggaccaagctggagatcaaac

SEQ ID NO: 12572 - DNA, 329 bp, Homo sapiens
cagtctgtgctgactcagccaccctcagcgtctgggacccccgggcagcggatcaccatctcttgttccgggagcacttccaacatcggcggtcagcctgtcaactggtaccagcaggtcccaggaagggcccccaaactcctcatttataataataatcagaggccctcaaatgtccctgaccgattctctggctccaagtctggcacttctgcctccctggccatcagtggactccagtctgaggatgaggctcactactattgtgcgacttgggatgacagcctgaatggtgctctcttcgccggggggaccaaggtgaccgtcct

SEQ ID NO: 12573 - DNA, 322 bp, Homo sapiens
gccatccggatgacccagtctccatcctcattctctgcatctacaggagacacagtcaccatcacttgtcgggcgagtcagggtattagcagttatttagcctggtatcaacaaaaaccagggaaagcccctaagctcctgatctatgctgcatccactttgcaaactggggtcccatcaaggttcagcggcagtggatctgggacagatttcactctcaccatcagctgcctgcagtctgaagattttgcaacttattactgtcaacagtattatagttaccctcggactttcggccaagggaccaaggtggaaatcaaac

SEQ ID NO: 12574 - DNA, 340 bp, Homo sapiens
gacatcgtgatgacccagtctccagactccctggctgtgtctctgggcgagagggccaccatcaactgcaagtccagccagagtgttttatacagctccaacaataagaactacttagcttggtaccagcagaaaccaggacagcctcctaagctgctcatttactgggcatctacccgggaatccggggtccctgaccgattcagtggcagcgggtctgggacagatttcactctcaccatcagcagcctgcaggctgaagatgtggcagtttattactgtcagcaatattatagtactcctcccactttcggccctgggaccaaagtggatatcaaac

SEQ ID NO: 12575 - DNA, 330 bp, Homo sapiens; identical to SEQ ID NO: 12493

SEQ ID NO: 12576 - DNA, 340 bp, Homo sapiens
gacatcgtgatgacccagtctccagactccctggctgtgtctctgggcgagagggccaccatcaactgcaagtccagccagagtgttttatacagctccaacaataagaactacttagcttggtaccagcagaaaccaggacagcctcctaagctgctcatttactgggcatctacccgggaatccggggtccctgaccgattcagtggcagcgggtctgggacagatttcactctcaccatcagcagcctgcaggctgaagatgtggcagtttattactgtcagcaatattatagtactcctctcactttcggccctgggaccaaagtggatatcaaac

SEQ ID NO: 12577 - DNA, 331 bp, Homo sapiens
cagtctgccctgactcagcctccctccgcgtccgggtctcctggacagtcagtcaccatctcctgcactggaaccagcagtgacgttggtttttataactatgtctcctggtaccaacagcacccaggcaaagcccccaaactcatgatttatgaggtcagtaagcggccctcaggggtccctgatcgcttctttggctccaagtctgacaacacggcctccctgaccgtctctgggctccaggctgaggatgaggctgattattactgcagctcatatgcaggcagcaacaatttgttattcggcggagggaccaagctgaccgtcctag

SEQ ID NO: 12578 - DNA, 328 bp, Homo sapiens
gaaattgtgttgacacagtctccagccaccctgtctttgtctccaggggaaagagccaccctctcctgcagggccagtcagagtgttagcagctacttagcctggtaccaacagaaacctggccaggctcccaggctcctcatctatgatgcatccaacagggccactggcatcccagccaggttcagtggcagtgggtctgggacagacttcactctcaccatcagcagcctagagcctgaagattttgcagtttattactgtcagcagcgtagcaactggcctccggaggtcactttcggccctgggaccaaagtggatatcaaac

SEQ ID NO: 12579 - DNA, 322 bp, Homo sapiens; identical to SEQ ID NO: 929

SEQ ID NO: 12580 - DNA, 322 bp, Homo sapiens; identical to SEQ ID NO: 837

SEQ ID NO: 12581 - DNA, 325 bp, Homo sapiens
tcttctgagctgactcaggaccctgctgtgtctgtggccttgggacagacagtcaggatcacatgccaaggagacagcctcagattctattatgcaagctggtaccagcagaggccaggacaggcccctctacttgtcatctatggtaaaaacaaccggccctcagggatcccagaccgattctctggctccagctcaggaaacacagcttccttgaccatcactggggctcaggcggaagatgaggctgactattactgtaactcccgggacagcagtggtaaccatctggtattcggcggagggaccaagctgaccgtcctag

SEQ ID NO: 12582 - DNA, 325 bp, Homo sapiens; identical to SEQ ID NO: 3577

SEQ ID NO: 12583 - DNA, 322 bp, Homo sapiens
gacatccagatgacccagtctccatcctccctgtctgcatctgtaggagacagagtcaccatcacttgccgggccagtcagagtattagtagctggttggcctggtatcagcagaaaccagggaaagcccctaagctcctgatctatgctgcatccactttgcaaagtggggtcccatcaaggttcagcggcagtggatctgggacagatttcactctcaccatcagctgcctgcagtctgaagattttgcaacttattactgtcaacagtattatagttacccccggacgttcggccaagggaccaaggtggaaatcaaac

SEQ ID NO: 12584 - DNA, 322 bp, Homo sapiens
gccatccggatgacccagtctccatcctcattctctgcatctacaggagacagagtcaccatcacttgtcgggcgagtcagggtattagcagttatttagcctggtatcagcaaaaaccagggaaagcccctaagctcctgatctatgctgcatccactttgcaaagtggggtcccatcaaggttcagcggcagtggatctgggacagatttcactctcaccatcagctgcctgcagtctgaagattttgcaacttattactgtcaacagtattatagttaccctccgcggttcggcggagggaccaaggtggagatcaaac

SEQ ID NO: 12585 - DNA, 310 bp, Homo sapiens
tcctatgagctgactcagtcaccctcagtgtccgtgtccccaggacagacagccagcatcacctgctctggagataaattgggggataaatatgcttgctggtatcagcagaagccaggccagtcccctgtgctggtcatctatcaagatagtaagcggccctcagggatccctgagcgattctctggctccaactctgggaacacagccactctgaccatcagcgggacccaggctatggatgaggctgactattactgtcaggcgtggcccagggtattcggcggagggaccaagctgaccgtcctag

SEQ ID NO: 12586 - DNA, 322 bp, Homo sapiens
gacatccagatgacccagtctccatcctccctgtctgcatctgtaggagacagagtcaccttcacttgccaggcgagtcaagacattagggtctatttaagttggtatcaacagaaaccagggaattcccctaaactcctgatctacgatgcatccaatttggaaacaggggtcccatcaaggttcactggacgtggatctgggacagtttttgctctcaccatcagcagcctgcagcctgaagatattggaacatactactgtcaacaatatgaaactgtcccattcactttcggccctgggaccaaagtggatatcaaac

SEQ ID NO: 12587 - DNA, 340 bp, Homo sapiens
gacatcgtgatgacccagtctccagactccctggctgtgtctctgggcgagagggccaccatcaactgcaagtccagccagagtgttttttataggtccagtaatcagaaccacttagcttggtaccagcagaaaccaggacagcctcctaagctgctcattcactgggcatctacccgggaatccggggtccctgaccgaatcagtggcagcgggtctgggacagatttcactctcaccatcagcagcctgcaggctgaagatgtggcagtttattactgtcagcaatattatagtactcctcggacgttcggccaagggaccaaggtggaaatcaaac

SEQ ID NO: 12588 - DNA, 334 bp, Homo sapiens
cagtctgtgctgacgcagccgccctcagtgtctggggccccagggcagagggtcaccatctcctgcactgggagcagctccaacatcggggcaggttatgatgtacactggtaccagcagcttccaggaacagcccccaaactcctcatctatggtaacaccaatcggccctcaggggtccctgagcgattctctggctccaagtctggcacctcggcctccctggccatcactgggctccaggctgaggatgaggctgattattactgccagtcctatgacagcagcctgagtggttgggtgttcggcggagggaccaggctgaccgtcctag

SEQ ID NO: 12589 - DNA, 339 bp, Homo sapiens
gatattgtgatgacccagactccactctctctgtccgtcacccctggacagccggcctccatctcctgcaagtctagtcagagcctcctgcatagtgatggaaagacctatttgtattggtacctgcagaagccaggccagtctccacagctcctgatctatgaagtttccagccggttctctggagtgccagataggttcagtggcagcgggtcagggacagatttcacactgaaaatcagccgggtggaggctgaggatgttggggtttattactgaatgcaaggtatacaccttccaagatcaccttcggccaagggacacgactggagattaaac

SEQ ID NO: 12590 - DNA, 322 bp, Homo sapiens; identical to SEQ ID NO: 837

SEQ ID NO: 12591 - DNA, 322 bp, Homo sapiens
gacatccagatgacccagtctccatcctccctgtctgcatctgtaggagacagagtcaccatcacttgccgggcaagtcagggcattagaaatgatttaggctggtatcagcagaaaccagggaaagcccctaagcgcctgatctatgctgcatccagtttgcaaagtggggtcccatcaaggttcagcggcagtggatctgggacagaattcactctcacaatcagcagcctgcagcctgaagattttgcaacttattactgtctacagcataatagttacccgtacacttttggccaggggaccaagctggagatcaaac

SEQ ID NO: 12592 - DNA, 340 bp, Homo sapiens
gatattgtgatgactcagtctccactctccctgcccgtcacccctggagagccggcctccatctcctgcaggtctagtcagagcctcctgcatagtaatggatacaactatttggattggtacctgcagaagccagggcagtctccacagctcctgatctatttgggttctgatcgggcctccggggtccctgacaggttcagtggcagtggatcaggcacagactttacactgaaaatcagcagagtggaggctgaggatgttggggtttattactgcatgcaagctccacaaactcccccggaggacttttggccaggggaccaagctggagatcaaa

SEQ ID NO: 12593 - DNA, 328 bp, Homo sapiens
caggctgtggtgactcaggtgccctcactgactgtgtccccaggagggacagtcactctcacctgtggctccagcactggagctgtcaccagtggtcattatccctactggttccagcagaagcctggccaagcccccaggacactgatttatgatacaagcaacaaacactcctggacccctgcccggttctcaggctccctccttgggggcaaggctgccctgaccctttcgggtgcgcagcctgaggatgaggctgactattactgcttgctctcctatagtggtgctcgggtattcggcggagggaccaagctgaccgtcctag

SEQ ID NO: 12594 - DNA, 322 bp, Homo sapiens; identical to SEQ ID NO: 1668

SEQ ID NO: 12595 - DNA, 328 bp, Homo sapiens
cagtctgtgttgacgcagccgccctcagtgtctgcggccccaggacagaaggtcaccatctcctgctctggaagcagctccaacattgggaataattatgtatcctggtaccagcagctcccaggaacagcccccaaactcctcatctatgaaaataataagcgaccctcagggattcctgaccgattctctggctccaagtctggcacgtcagccaccctgggcatcaccggactccagactggggacgaggccgattattactgcggaacatgggatagcagcctgagtgcgggattcggcggagggaccaagctgaccgtcctag

SEQ ID NO: 12596 - DNA, 322 bp, Homo sapiens
gacatccagatgacccagtctccatcctccctgtctgcatctgtaggagacagagtcaccatcacttgccgggcgagtcagggcattagcaattatttagcctggtatcagcagaaaccagggaaagttcctaagctcctgatctatgctgcatccactttgcaatcaggggtcccatctcggttcagtggcagtggatctgggacagatttcactctcaccatcagcagcctgcagcctgaagatgttgcaacttattactgtcaaaagtataacagtgccccttggacgttcggccaagggaccaaggtggaaatcaaac

SEQ ID NO: 12597 - DNA, 322 bp, Homo sapiens; identical to SEQ ID NO: 9339

SEQ ID NO: 12598 - DNA, 325 bp, Homo sapiens
tcttctgagctgactcaggaccctgctgtgtctgtggccttgggacagacagtcaggatcacatgccaaggagagagcctcagaagttattatgcaagctggtaccagcagaagccaggacagggccctgtacttgtcatgtatggtaaaaacaaccggccctcagggatcccagaccgattctctggctccacctcaggagacacagcttccttgaccatcacgggggctcaggcggaagatgaggctgactattactgtaactcccgggacaggagtggtaaccatctggtgttcggcggagggaccaagctgaccgtcctag

SEQ ID NO: 12599 - DNA, 322 bp, Homo sapiens; identical to SEQ ID NO: 808

SEQ ID NO: 12600 - DNA, 331 bp, Homo sapiens
cagtctggcctgactcagcctgcctccgtgtctgggtctcctggacagtcgatcaccgtctcctgcactggaaccagcagtgacgttggtggttataactatgtctcctggtaccaacagcacccaggcaaagcccccaaactcatgatttatgatgtcagtaatcggccctcaggggtttctaatcgcttctctggctccaagtctggcaacacggcctccctgaccatctctgggctccaggctgaggacgaggctgattattactgcagttcatatagaagcgacagcactctagtcttcggaactgtgaccaaggtcaccgtcttag

SEQ ID NO: 12601 - DNA, 322 bp, Homo sapiens
gtcatctggatgacccagtctccatccttactctctgcatctacaggagacagagtcaccatcagttgtcggatgagtcagggcattagcagttatttagcctggtatcagcaaaaaccagggaaagcccctgagctcctgatctatgctgcatccactttgcaaagtggggtcccatcaaggttcagtggcagtggatctgggacagatttcactctcaccatcagttgcctgcagtctgaagattttgcaacttattactgtcaacagtattatagtttcccgctcactttcggcggagggaccaaggtggagatcaaac

SEQ ID NO: 12602 - DNA, 331 bp, Homo sapiens
cagtctgccctgactcagcctgcctccgtgtctgggtctcctggacagtcgatcaccatctcctgcactggaaccagcagtgacgttggtggttataactatgtctcctggtaccaacaacacccaggcaaagcccccaaactcatgatttatgatgtcagtaatcggccctcaggggtttctaatcgcttctctggctccaagtctggcaacacggcctccctgaccatctctgggctccaggctgaggacgaggctgattattactgcagctcatatagaagcgacagcactgtggtattcggcggggggaccaagctgaccgtcctag

SEQ ID NO: 12603 - DNA, 331 bp, Homo sapiens
cagtctgccctgactcagcctcgctcagtgtccgggtctcctggacagtcagtcaccatctcctgcactggaaccagcagtgatgttggtgcttataactatgtctcctggtaccaacagcacccaggcaaagcccccaaactcatgatttatgatgtcaataagcggccctcaggggtccctgatcgcttctctggctccaagtctggcaacacggcctccctgaccatctctgggctccaggctgaggatgaggctgattattactgctgctcatatgcaggcagctacattttgctattgggcggagggaccaagctgaccgtcctag

SEQ ID NO: 12604 - DNA, 322 bp, Homo sapiens; identical to SEQ ID NO: 3870

SEQ ID NO: 12605 - DNA, 331 bp, Homo sapiens; identical to SEQ ID NO: 4649

SEQ ID NO: 12606 - DNA, 325 bp, Homo sapiens; identical to SEQ ID NO: 883

SEQ ID NO: 12607 - DNA, 337 bp, Homo sapiens
gatgttgtgatgactcagtctccactctccctgcccgtcacccttggacagccggcctccatctcctgcaggtctagtcaaagcctcgtatacagtgatggaaacacctacttgaattggtttcagcagaggccaggccaatctccaaggcgcctaatttataaggtttctaactgggactctggggtcccagacagattcagcggcagtgggtcaggcactgatttcacactgaaaatcagcagggtggaggctgaggatgttggggtttattactgcatgcaagctctacaaacacccctcactttcggcggagggaccaaggtggagatcaaac

SEQ ID NO: 12608 - DNA, 331 bp, Homo sapiens
cagtctgccctgactcagcctgcctccgtgtctgggtctcctggacagtcgatcaccatctcctgcactggaaccagcagtgacgttggtggttataactatgtctcctggtaccaacagcacccaggcaaagcccccaaactcatgatttatgatgtcagtaatcggccctcaggggtttctaatcgcttctctggctccaagtctggcaacacggcctccctgaccatctctgggctccaggctgaggacgaggctgattattactgtagctcatatagaagcgacagcactctggtgttcggcggagggaccaagctgaccgtcctag

SEQ ID NO: 12609 - DNA, 334 bp, Homo sapiens
cagcttgtgctgactcaatcgccctctgcctctgcctccctgggagcctcggtcaagctcacctgcactctgagcagtgggcacagcaactacgccatcgcatggcatcagcagcagccagagaagggccctcgctacttgatgaagcttaacagtgatggcagccgcagcaagggggacgggatccctgatcgcttctcaggctccagctctggggctgagcgctacctcaccatctccagtctccagtctgaggatgaggctgactattactgtcagacctggggcactggcatcggggtattcggcggagggaccaagctgaccgtcctag

SEQ ID NO: 12610 - DNA, 322 bp, Homo sapiens
gacatccagatgacccagtctccatcttctgtgtctgcatctgtaggagacagagtcaccatcacttgtcgggcgagtcagggtattagcagctggttagcctggtatcagcagaaaccagggaaagcccctaagctcctgatctatgctgcatccagtttgcaaagtggggtcccatcaaggttcagcggcagtggatctgggacagatttcactctcactatcagcagcctgcagcctgaagattttgcaacttactattgtcaacaggctaacagtttccctcggacttttggccaggggaccaagctggagatcaaac

SEQ ID NO: 12611 - DNA, 331 bp, Homo sapiens; identical to SEQ ID NO: 1754

SEQ ID NO: 12612 - DNA, 322 bp, Homo sapiens; identical to SEQ ID NO: 4737

SEQ ID NO: 12613 - DNA, 325 bp, Homo sapiens
tcttctgagctgactcaggaccctgctgtgtctgtggccttgggacagacagtcaggatcacatgccaaggagacagcctcagaagctattatacaaactggtaccagcagaagccaggacaggcccctgttcttgtcatctatggtacaaacaaccggccctcagggatctcagaccgattctctggctccagctcaggaaacacagcttccttgaccatcactgggtctcaggcggaggatgaagctgactattattgtaattcccgggacagcagtggtaaccatcttgtcttcggaactgggaccaaggtcaccgtcctag

SEQ ID NO: 12614 - DNA, 340 bp, Homo sapiens
gacatcgtgatgacccagtctccagactccctggctgtgtctctgggcgagagggccaccatcaactgcaagtccagccagagtgttttatacaactccaacaataagaactacttagcttggtaccagcagagaccaggacagcctcctaagctgctcatttactgggcatctacccgggaatccggggtccctgaccgattcagtggcagcgggtctgggacagatttcactctcaccatcagcagcctgcaggctgatgatgtggcagtttattactgtcagcattattatgatactcctccgacgttcggccaagggaccaaggtggaaatcaaac

SEQ ID NO: 12615 - DNA, 331 bp, Homo sapiens
cagtctgccctgactcagcctgcctccgtgtctgggtctcctggacagtcgatcaccatctcctgcactggaaccagcagtgacgttggtggttataactatgtctcctggtaccaacagcacccaggcaaagcccccaaactcatgatttatgaggtcagtaatcggccctcagggatttctgatcgcttctctggctccaagtctggcaacacggcctccctgaccatctctgggctccaggctgaggacgaggctgattattactgcagctcatatacaagcagcagcactctagtcttcggaactgggaccaaggtcaccgtcctag

SEQ ID NO: 12616 - DNA, 331 bp, Homo sapiens; identical to SEQ ID NO: 7757

SEQ ID NO: 12617 - DNA, 322 bp, Homo sapiens
gacatccagatgacccagtctccatcctccctgtctgcatctgtaggagacagagtcaccatcacttgccgggcaagtcagagtattaatacctacttaaattggtatcagcagaaaccagggaaagcccctaggctcctgatctatgctgcatccagtttacaaagtggggtcccatcaaggttcagtggcagtggatctcggacagatttcactctcaccatcagcagtctgcaacctgaagattttgcaagttattattgtcaacagagttacaataccccgtacacttttggccaggggaccaagctgcagatcaaac

SEQ ID NO: 12618 - DNA, 325 bp, Homo sapiens
tcctatgtgctgactcagccaccctcggtgtcagtggccccaggacagacggccaggattacctgtgggggaaacaacattggaagtaaaagtgtgcactggtaccagcagaagccaggccaggcccctgtgctggtcatctatgatgatagcgaccggccctcagggatccctgagcgattctctggctccaactctgagaacacggccaccctgaccatcagcagggtcgaagccggggttgaggccgactattactgtcaggtgtgggatagtagtagtggtcatccggagttcggcggagggaccaagctgaccgtcctag

SEQ ID NO: 12619 - DNA, 348 bp, Homo sapiens
caggctgtgctgactcagccggcttccctctctgcatctcctggagcatcagccagtctcacctgcaccttgcgcagtggcatcaatgttggtacctacaggatatactggtaccagcagaagccagggagtcctccccagtatctcctgaggtacaaatcagactcagataagcagcagggctctggagtccccagccgcttctctggatccaaagatgcttcggccaatgcagggattttactcatctctgggctccagtctgaggatgaggctgactattactgtatgatttggcacagcagcgcccttgggtgttcggcggagggaccaagctgaccgtcctag

SEQ ID NO: 12620 - DNA, 325 bp, Homo sapiens
gacatccagatgacccagtctccatcctccctgtctgcatctgtaggagacagagtcaccatcacttgccaggcgagtcaggacattagcaactatttaaattggtatcagcagaaaccagggaaagcccctaagctcctgatctacgatgcatccaatttggaaacaggggtcccatcaaggttcagtggaagtggatctgggacagatttttctttcgccatcagcagcctgcagcctgaagatattgcaacatattactgtcaacagtatgatgatctcccctcgctcagtttcggcggagggaccaaggtggagatcaaac

SEQ ID NO: 12621 - DNA, 337 bp, Homo sapiens
cagtctgccctgactcagcctgcctccgtgtctgggtctcctggacagtcgatcaccatctcctgcactggaaccagcagtgacgttggtggttataactatgtctcctggtaccaacagcacccaggcaaagcccccaaactcatgatttatgatgtcagtaatcggccctcaggggtttctaatcgcttctctggctccaagtctggcaacacggcctccctgaccatctctgggctccaggctgaggacgaggctgattattactgcagctcatatacaagcagcagcactccccattgggtgttcggcggagggaccaagctgaccgtcctag

SEQ ID NO: 12622 - DNA, 322 bp, Homo sapiens
gccatccggatgacccagtctccatcctcattctctgcatctacaggagacagagtcaccatcacttgtcgggcgagtcagggtattagcagttatttagcctggtatcagcaaaaaccagggaaagcccctaagttcctgatctctgctgcatccactttgcaaagtggggtcccatcaaggttcagcggcagtggatctgggacagatttcactctcaccatcagctgcctgcagtctgaagattttgcaacttattactgtcaacagtattatagttacccgctcactttcggcggagggaccaaggtggagatcaaac

SEQ ID NO: 12623 - DNA, 322 bp, Homo sapiens; identical to SEQ ID NO: 955

SEQ ID NO: 12624 - DNA, 325 bp, Homo sapiens
gaaattgtgttgacgcagtctccaggcaccctgtctttgtctccaggggaaagagccaccctctcctgcagggccggtcagagtgttagcagcagctacttagcctggtaccagcagaaacctggccaggctcccaggctcctcatctatggtgcatccagcagggccactggcatcccagacaggttcagtggcagtgggtctgggacagacttcactctcaccatcagcagactggagcctgaagattttgcagtgtattactgtcagcagtatggtagctcacctcggacgttcggccaagggaccaaggtggaaatcaaac

SEQ ID NO: 12625 - DNA, 322 bp, Homo sapiens; identical to SEQ ID NO: 4002

SEQ ID NO: 12626 - DNA, 331 bp, Homo sapiens
cagtctgccctgactcagcctgcctccgtgtctgggtctcctggacagtcgatcaccatctcctgcactggaaccagcagtgacgttggtggttataactatgtctcctggtaccaacagcacccaggcaaagcccccaaactcatgattcatgacgtcagtaatcggccctcaggggtgtctagtcggctctctggctccaagtctggcaacacggcctccctgaccatctctgggctccaggctgaggacgaggctgattattactgcacctcatatacaagcagcagcacttgggtgttcggcggagggaccaagctgaccgtcctag

SEQ ID NO: 12627 - DNA, 328 bp, Homo sapiens
cagtctgtgttgacgcagccgccctcagtgtctgcggccccaggacagaaggtcaccatctcctgctctggaagcagctccaacattgggaataattatgtatcctggtaccagcagctcccaggaacagcccccaaactcctcatctatgaaaataataagcgaccctcagggattcctgaccgattctctggctccaagtctggcacgtcagccaccctgggcatcaccggactccagactggggacgaggccgattattactgcggaacatgggatagcagcctgagtgccctattcggcggagggaccaagctgaccgtcctag

SEQ ID NO: 12628 - DNA, 322 bp, Homo sapiens; identical to SEQ ID NO: 3452

SEQ ID NO: 12629 - DNA, 334 bp, Homo sapiens
cagtctgtgctgacgcagccgccctcagtgtctggggccccagggcagagggtcaccatctcctgcactgggagcagctccaacatcggggcaggttatgatgtacagtggtaccaccagcttccaggaacagcccccaaactcctcatgtatggtaacagcgatcggccctcaggggtccctgaccgattcgctggctccaagtctggcacctcagcctccctggccatcactgggctccaggctgaggatgaggctgattattattgccagtcctatgacagcagtctgcgtatttgggtgttcggcggagggaccaaggtgaccgtcctag

SEQ ID NO: 12630 - DNA, 346 bp, Homo sapiens
caggctgtgctgactcagccggcttccctctctgcatctcctggagcatcagccagtctcacctgcaccttgcgcagtggcatcaatgttggtacctacaggatatactggtaccagcagaagccagggagtcctccccagtatctcctgaggtacaaatcagactcagataagcagcagggctctggagtccccagccgcttctctggatccaaagatgcttcggccaatgcagggattttactcatctctgggctccagtctgaggatgaggctgactattactgtatgatttggcacagcagcgctgtggtattcggcggagggaccaagctgaccgtcctag

SEQ ID NO: 12631 - DNA, 325 bp, Homo sapiens
gaaattgtgttgacgcagtctccaggcaccctgtctttgtctccaggggaaagagccaccctctcctgcagggccagtcagagtgttagcagcagctacttagcctggtaccagcagaaacctggccaggctcccaggctcctcatctatggtgcatccagcagggccactggcatcccagacaggttcagtggcagggggtctgggacagacttcactctcaccatcagcagactgcagcctgaagattttgcagtgtattactgtcagcagtatggtagctcacctcgaacgttcggccaagggaccaaggtggaaatcaaac

SEQ ID NO: 12632 - DNA, 322 bp, Homo sapiens
gacatccagatgacccagtctccatcatccctgtctgcatctgtaggagacagagtcaccatcacttgccgggcaagtcagagcattagcacctatttaaattggtatcagcagaaaccagggaaagcccctaacctcctgatctatgctgcagacagtttgcaaactggggtcccatcaaggttcagtggcagtggatcgggaacagatttcactctcaccataggcagtctacaacctgaagattttgcaatttattactgtcaacagagttacagtcccctgtggacgttcggccaagggaccaaggtggaaatcaaac

SEQ ID NO: 12633 - DNA, 322 bp, Homo sapiens
gacatccagatgacccagtctccttccaccctgtctgcatctgtaggagacagagtcaccatcacttgccgggccagtcagagtattagtagctggttggcctggtatcagcagaaaccagggaaagcccctaacctcctgatctataaggcgtctagtttagaaggtggggtcccatcaaggttcagcggcagtggatctgggacagaattcactctcaccatcagcagcctgcagcctgatgattttgcaacttattactgccaacagtataatagttacccattcactttcggccctgggaccaaagtggatatcaaac

SEQ ID NO: 12634 - DNA, 337 bp, Homo sapiens
gacatcgtgatgacccagtctccagactccctggctgtgtctctgggcgagagggccaccatcaactgcaagtccagccagagtgttttatacagctccaacaataagaactacttagcttggtaccagcagaaaccaggacagcctcctaagctgctcatttactgggcatctattcgggaatccggagtccctgaccgattcagtggcagcgggtctgggacagatttcactctcaccatcagcagcctgcaggctgaagatgtggcagtttattactgtcagcaatattatcgcctcaggacgttcggccaagggaccaaggtggaaatcaaac

SEQ ID NO: 12635 - DNA, 328 bp, Homo sapiens; identical to SEQ ID NO: 2605

SEQ ID NO: 12636 - DNA, 322 bp, Homo sapiens
gccatccggatgacccagtctccatcctcattctctgcatctacaggagacagagtcaccatcacttgtcgggcgagtcagggtattagcagttatttagcctggtatcagcaaaaaccagggaaagcccctaaactcctgatctatgctgcatccactttgcaaagtggggtcccgtcaaggttcagcggcagtggatctgggacagatttcactctcaccatcagctgcctgcagtctgaagattttgcaacttattactgtcaacagtattataattaccctcggacgttcggccaagggaccaaggtggaaatcaaac

SEQ ID NO: 12637 - DNA, 325 bp, Homo sapiens
tcctatgagctgacacagccaccctcggtgtcagtgtccccaggacaaacggccaggatcacctgctctggagatgcattgccaaaaaaatatgcttattggtaccagcagaagtcaggccaggcccctgtgctggtcatctatgaggacagcaaacgaccctccgggatccctgagagattctctggctccagctcagggacaatggccaccttgactatcagtggggcccaggtggaggatgaagctgactactactgttactcaacagacagcagtggtaattattatgtcttcggaactgggaccaaggtcaccgtcctag

SEQ ID NO: 12638 - DNA, 331 bp, Homo sapiens
cagtctgtgctgactcagccaccctcagcgtctgggacccccgggcagagggtcaccatctcttgttctggaagcagctccaacatcggaagtaattatgtatactggtaccagcagctcccaggaacggcccccaaactcctcatctataggaataatcagcggccctcaggggtccctgaccgattctctggctccaagtctggcacctcagcctccctggccatcagtgggctccggtccgaggatgaggctgattattactgtgcagcatgggatgacagcctgagtggcgtggtattcggcggagggaccaagctgaccgtcctag

SEQ ID NO: 12639 - DNA, 322 bp, Homo sapiens; identical to SEQ ID NO: 837

SEQ ID NO: 12640 - DNA, 334 bp, Homo sapiens
cagcctgtgctgactcaatcatcctctgcctctgcttccctgggatcctcggtcaagctcacctgcactctgagcagtgggcacagtgcctacatcatcgcatggcatcagcagcagccagggaaggcccctcggtacttgatgaagcttgaacgtagtggaagctacaacaaggggagcggagttcctgatcgcttctcaggctccagctctggggctgaccgctacctcaccatctccaacctccagtttgaggatgaggctgattattactgtgagacctgggacagtagctcttgggtgttcggcggagggaccaagctgaccgtcctag

SEQ ID NO: 12641 - DNA, 334 bp, Homo sapiens
cagtctgccctgactcagcctgcctccgtgtctgggtctcctggacagtcgatcaccatctcctgcactggaaccagcagtgacgttggtggttataactatgtgtcctggtaccaacaccacccaggcaaagcccccaaactcatgatttatgaggtcagtaatcggccctcaggggtttctaatcgcttctctggctccaagtctgacaacacggcctccctgaccatctctgggctccaggctgaggacgaggctgattatttctgcagctcatatacaatccgcaacacatatgtgctattcggcggagggaccaagctgaccgtcctag

SEQ ID NO: 12642 - DNA, 322 bp, Homo sapiens
gacatccagatgacccagtctccttccactctgtctgcatctgtaggagacagagtcaccatcacttgccgggccagtcagagtataagtagctggttggcctggtatcagcagaaaccagggaaagcccctaagctcctgatctataaggcgtctagtttagaaagtggggtcccatcaaggttcagcggcagtggatctgggacagaattcactctcaccatcagcagcctgcagcctgatgatttagcaacttattactgccaacagtataatagttatccgtacacttttggccaggggaccaagctggagatcaaac

SEQ ID NO: 12643 - DNA, 331 bp, Homo sapiens
cagtctgccctgactcagcctccctccgcgtccgggtctcctggacagtcagtcaccatctcctgcactggaaccagcagtgacgttggtggttataactatgtctcctggtaccaacagcacccaggcaaagcccccaaactcatgatttatgacgtcagtaagcggccctcaggggtccctgatcgcttctttgcctccaagtctggcaacacggcctccctgaccgtctctgggctccaggctgaggatgaggctgattattactgcagttcatatgcaggcagcaacaatttggtcttcggcggagggaccaaagtgaccgtcctag

SEQ ID NO: 12644 - DNA, 331 bp, Homo sapiens
cagtctgccctgactcagcctccctccgcgtccgggtctcctggacagtcagtcaccatctcctgcactggaaccagcagtgacgttggtggttataactatgtctcctggtaccaacaacacccaggcaaagcccccaaactcatgatttatgaggtcactaagcggccctcaggggtccctgatcgcttctctggctccaagtctggcaacacggcctccctgaccgtctctgggctccaggctgacgatgaggctgattattactgcagctcatatgcaggcagcaacaatttggtattcggcggagggaccaagctgaccgtcctag

SEQ ID NO: 12645 - DNA, 325 bp, Homo sapiens
gaaattgtgttgacgcagtctccaggcaccctgtctttgtctccaggggaaagagccaccctctcctgcagggccagtcagagtgttagcagcaccaacttagtctggtatcagcagaaacctggcctggctcccaggctcctcatctatggtgcatccaacagggccactggcattcccgacaggttcagtggcagtgggtctgggacagacttcactctcaccatcagcagactggagcctgaagattttgcagtatattactgtcagcagtttgttaacccacagtacacttttggccaggggaccaagctggagatcaaac

SEQ ID NO: 12646 - DNA, 322 bp, Homo sapiens
gtcatctggatgacccagtctccatccttactctctgcatctacaggagacagagtcaccatcagttgtcggatgagtcagggcattagcagttatttagcctggtatcagcaaaaaccagggaaagcccctgagctcctgatctatgctgcatccactttgcaaagtggggtcccatcaaggttcagtggcagtggatctgggacagatttcactctcaccatcagttgcctgcagtctgaagattttgcaacttattactgtcaacagtattatagtttccctccggcgttcggccaagggaccaaggtggaaatcaaac

SEQ ID NO: 12647 - DNA, 331 bp, Homo sapiens
cagtctgccctgactcagcctgcctccgtgtctgggtctcctggacagtcgatcaccatctcctgcactggaaccagcagtgacgttggtggttataactatgtctcctggtaccaacagcacccaggcaaagcccccaaactcctgatttatgaggtcagtaatcggccctcaggggtttctaatcgcttctctggctccaagtctggcaacacggcctccctgaccatctctgggctccaggctgaggacgaggctgattattactgcagctcatatacaagcagtagcacttatgtcttcggaactgtgaccaaggtcaccgtcctag

SEQ ID NO: 12648 - DNA, 331 bp, Homo sapiens
cagtctgccctgactcagcctgcctccgtgtctgggtctcctggacagtcgatcaccatctcctgcactggaaccagcagtgatgttgggagttataaccttgtcacttggtaccaacagcacccaggcaaagcccccaaactcatgatttatgaggtcagtaagcggccctcaggggtttctaatcgcttctctggctccaagtctggcaacacggcctccctgacaatctctgggctccaggctgaggacgaggctgattatcactgctgctcatatgcagggagtagcactttggtattcggcggagggaccaagctgaccgtcctag

SEQ ID NO: 12649 - DNA, 325 bp, Homo sapiens
tcttctgagctgactcaggaccctgctgtgtctgtggccttgggacagacagtcaggatcacatgccaaggagacagcctcagaagctattatgcaagctggtaccagcagaagccaggacaggcccctgtacttgtcatctatgataaaaacaaccggccctcagggatcccagaccgattctctggctccagctcaggaaacacagcttccttgaccatcactggggctcaggcggaagatgaggctgactattactgtaactcccgggacagcagtggtaaccatctggtattcggcggagggaccaagctgaccgtcctag

SEQ ID NO: 12650 - DNA, 337 bp, Homo sapiens
cagtctgccctgactcagcctgcctccgtgtctgggtctcctggacagtcgatcaccatctactgcactggaaccagcagtgacgttggtggttatgactatgtctcctggtaccaacaacacccaggcaaagcccccaaactcatgatttatgaggtcactaatcgcccctcaggggtttctaatcgcttctctggctccaagtctggcaacacggcctccctgaccatctctgggctccaggctgaggacgaggctgattattactgcagctcatatacaagcagcagcactcttaattgggtgttcggcggagggaccaagctgaccgtcctag

SEQ ID NO: 12651 - DNA, 337 bp, Homo sapiens
cagtctgccctgactcagcctgcctccgtgtctgggtctcctggacagtcgatcaccatctcctgcactggaaccagcagtgacgttggtggttataactatgtctcctggtaccaacagcacccaggcaaagcccccaaactcatgatttatgatgtcagtaatcggccctcaggggtttctaatcgcttctctggctccaagtctggcaacacggcctccctgaccatctctgggctccaggctgaggacgaggctgattattactgcagctcatatacaagcagcagcactcttaattgggtgttcggcggagggaccaagctgaccgtcctag

SEQ ID NO: 12652 - DNA, 334 bp, Homo sapiens; identical to SEQ ID NO: 9374

SEQ ID NO: 12653 - DNA, 331 bp, Homo sapiens
cagtctgtgctgactcagccaccctcggtgtctgaagcccccaggcagagggtcaccatctcctgttctggaagcagctccaacatcggaaataatgctgtaaactggtaccagcagctcccaggaaaggctcccaaactcctcatctattatgatgatctgctgccctcaggggtctctgaccgattctctggctccaagtctggcacctcagcctccctggccatcagtgggctccagtctgaggatgaggctgattattactgtgcagcatgggatgacagcctgaatggtccggtattcggcggagggaccaagctgaccgtcctag

SEQ ID NO: 12654 - DNA, 331 bp, Homo sapiens
cagactgtggtgacccaggagccatcgttctcagtgtcccctggagggacagtcacactcacttgtggctcgagttctggctcagtctctactggttactaccccagctggtaccagcagaccccaggccaggctccacgcacgctcatctacagcacaaacactcgctcttctggggtccctgatcgcttctctggctccatccttgggaacaaagctgccctcaccatcacgggggcccaggcagatgatgaatctgattattactgtttgttgtatatgggtagtggcatccgggtgttcggcggagggaccaagctgaccgtcctag

SEQ ID NO: 12655 - DNA, 322 bp, Homo sapiens
gaagttgtgttgacacagtctccagccaccctgtctttgtctccaggggaaagagccaccctctcctgcagggccagtcagagtattagcagctacttagcctggtaccaacagaagcctggccaggctcccaggctcatcatctatgatgcatccaacagggccactggcatcccagccaggttcagtggcagcgggtctgggacagacttcactctcaccatcagcagcctagagcctgaagattttgcagtttattactgtcagcagcgtagcaactggccgctcactttcggcggagggaccaaggtggagatcaaac

SEQ ID NO: 12656 - DNA, 331 bp, Homo sapiens
cagtctgtgctgactcagccaccctcagcgtctgggacccccgggcagagggtcaccatctcttgttctggaagcaggtccaacatcggaagttacactgtaaattggtaccaccagctcccaggaatggcccccaaactcctcatctttaataataatcagcggccctcaggggtccctgaccgattctctggctccaagtctggcacctcagcctccctggccatcagtgggctccagtctgaggatgaggctgattattactgtgcaggatgggatgacagcctgaattgtgtggtgttcggcggagggaccaaggtgaccgtcctag

SEQ ID NO: 12657 - DNA, 322 bp, Homo sapiens
gacatccagatgacccagtctccatcctccctgtctgcatctgtaggagacagagtcaccatcacttgccgggcgagtcagggcattagcaattatttagcctggtatcagcagaaaccagggaaagttcctaagctcctgatctatgctgcatccactttgcaatcaggggtcccatctcggttcagtggcagtggatctgggacagatttcagtctcaccatcagcagcctgcagcctgaagatgttgcaacttattactgtcaaaagtataacagtgccccgtacacttttggccaggggaccaagctggagatcaaac

SEQ ID NO: 12658 - DNA, 325 bp, Homo sapiens
gaaattgtgttgacgcagtctccaggcaccctgtctttgtctccaggggaaagagccaccctctcctgcagggccagtcagagtgttaacaacaactacttagcctggtaccagcaaaaacctggccaggctcccaggctcctcatctatgttgcatccagcagggccactggcatcccagacaggttcagtggcagtgggtctgggacagacttcgctctcaccatcagcagattggagcctgaagattttgcagtgtattactgtcagcagtatggtggctcaccgtggacgttcggccaagggaccaaggtggaaatcaaac

SEQ ID NO: 12659 - DNA, 322 bp, Homo sapiens; identical to SEQ ID NO: 11860

SEQ ID NO: 12660 - DNA, 322 bp, Homo sapiens; identical to SEQ ID NO: 4679

SEQ ID NO: 12661 - DNA, 322 bp, Homo sapiens
gaaatagtgatgacgcagtctccagacaccctgtctgtgtctccaggggaaagagccaccctctcctgcagggccagtcagagtgccagcagcaacttagcctggtaccagcagaaacctggccaggctcccaggctcctcatccatggtgcatccaccagggccactggtgtcccagccaggttcagtggcagtgggtctgggacagagttcactctcaccatcagcagcctgcagtctgaagattttgcagtttattactgtcagcagtataataactggccgtacacttttggccaggggaccaagctggagatcaaac

SEQ ID NO: 12662 - DNA, 320 bp, Homo sapiens
gaaattgtgttgacacagtctccagccaccctgtctttgtctccaggggaaagagccaccctgtcctgcagggccagtcagagtattagcaactacttagcctggtaccaacagaaacctggccaggctcccaggctcctcatctatgatgcatccagcagggccactggcatcccagccaggttcagtggcagtgggtctgggacagacttcactctcaccatcagcagcctagaggctgaagattttgcagtttatttctgtcagcagcgtagcgactggccggacacttttggccaggggaccaaactggagatcaa

SEQ ID NO: 12663 - DNA, 334 bp, Homo sapiens
gatattgtgatgactcagtctccactctccctgcccgtcacccctggagagccggcctccatctcctgcaggtctagtcagagcctcctgcatagtaatggatacaactatttggattggtacctgcagaagccagggcagtctccacaactcctgatctatttgggttctaatcgggcctccggggtccctgacaggttcagtggcagtggatcaggcacagattttacactgaaaatcagcagagtggaggctgaggatgttggggtttattactgcatgcaagctctaaaaggactcactttcggcggagggaccaaggtggagatcaaac

SEQ ID NO: 12664 - DNA, 334 bp, Homo sapiens
cagtctgtgttgactcagccaccctcagcgtctgggacccccgggcagagggtcaccatctcttgttctggaagcagctccaacatcggaagtaattatgtgtactggtaccagcagctcccaggaacggcccccaaactcctcatctatgggaataatcagcggccctcaggggtccctgaccgattctctggctccacgtctggcacctcagcctccctggccatcagtgggctccggtccgaggatgaggctgattattactgtgcagcatgggatgacagcctgagtggtcgtgtggtattcggcggagggaccaagctgaccgtcctag

SEQ ID NO: 12665 - DNA, 340 bp, Homo sapiens
gacatcgtgatgacccagtctccagactccctggctgtgtctctgggcgagagggccaccatcaactgtaagtccagccagagtgttttatacagctccaacaataagaactacttagcttggtaccagcagaaaccaggacaacctcctaagctgctcatttactgggcatctacccgggaatccggggtccctgaccgattcagtggcagcgggtctgggacagatttcactctcaccatcagcagcctgcaggctgaagatgtggcagtttattactgtcagcaatattatagtagtccgtggacgttcggccaagggaccaaggtggaaatcaaac

SEQ ID NO: 12666 - DNA, 337 bp, Homo sapiens
cagtctgccctgactcagcctgcctccgtgtctgggtctcctggacagtcgatcaccatctcctgcactggaaccagcagtgacgttggtgcttataactatgtctcctggtaccaacagcacccaggcaaagcccccaaactcatgatttatgatgtcagttatcggccctcaggggtttctaatcgcttctctggctccaagtctggcaacacggcctccctgaccatctctgggctccaggctgaggacgaggctgattattactgcagctcatatacaagcagcagcactccctattgggtgttcggcggagggaccaagctgaccgtcctag

SEQ ID NO: 12667 - DNA, 322 bp, Homo sapiens
gacatccagatgacccagtctccatcctccctgtctgcatctgtaggagacagagtcaccatcacttgccgggcaagtcagagcattagcacctatttaaattggtatcagcagaaaccagggaaagcccctaacctcctgatctttgctgcatccagtttgcaaaatggggtcccatcaaggttcagtggcagtggatctgggacagatttcactctcaccatcagcagtctgcaacctgaagatgttgcaagttactactgtcaacagagttacagtatcccgtggacgttcggccaagggaccaaggtggaaatcaaac

SEQ ID NO: 12668 - DNA, 322 bp, Homo sapiens; identical to SEQ ID NO: 3949

SEQ ID NO: 12669 - DNA, 323 bp, Homo sapiens
tcttctgagctgactcaggaccctgctgtgtctgtggccttgggacagacagtcaggatcacatgccaaggagacagcctcagaagctattatgcaagctggtaccagcagaagccaggacagacccctgtacttgtcatctatggtaaaaacaaccggccctcagggatcccagaccgattctctggctccagctcaggaaacacagcttccttgaccatcactggggctcaggcggaagatgaggctgactattattgtaactcccgggacagcagaggtaaccatctggtgttcggcggagggaccaagttgaccgtcct

SEQ ID NO: 12670 - DNA, 331 bp, Homo sapiens; identical to SEQ ID NO: 12363

SEQ ID NO: 12671 - DNA, 319 bp, Homo sapiens
gaagttgtgttgacacagtctccagccaccctgtctttgtctccaggggaaagagccaccctctcctgcagggccagtcagagtgttagcagctccttagcctggtaccaacagagacctggccaggctcccaggctcctcatctatgatgcatccaacagggccactggcatcccaggcaggttcagtggcagtgggtctgggacagacttcactctcaccatcagcagcctagagcctgaagattttgcagtttattactgtcagcagcgtagcaactggcctcggacttttggccaggggaccaagctggagatca

SEQ ID NO: 12672 - DNA, 340 bp, Homo sapiens; identical to SEQ ID NO: 1590
